(19) United States
(12) Patent Application Publication
(10) Pub. No.: US 2023/0070861 A1
(43) Pub. Date: Mar. 9, 2023

(54) COMPOSITIONS AND METHODS FOR TREATING HEPATITIS B

(71) Applicant: Beam Therapeutics Inc., Cambridge, MA (US)

(72) Inventors: Elena SMEKALOVA, Cambridge, MA (US); Michael PACKER, Cambridge, MA (US); Francine GREGOIRE, Cambridge, MA (US); Luis BARRERA, Cambridge, MA (US); Giuseppe CIARAMELLA, Cambridge, MA (US)

(73) Assignee: Beam Therapeutics Inc., Cambridge, MA (US)

(21) Appl. No.: 17/610,119

(22) PCT Filed: May 8, 2020
(86) PCT No.: PCT/US2020/032226

§ 371 Date: Nov. 9, 2021

Related U.S. Application Data
(60) Provisional application No. 62/927,585, filed on Oct. 29, 2019.
(60) Provisional application No. 62/846,422, filed on May 10, 2019.

(51) Int. Cl. A61K 31/7088; C07K 14/005; C12N 15/10; C12N 15/113; C12N 15/90; C12N 9/22; C12N 9/78; A61P 31/20

(52) U.S. Cl. CPC A61K 31/7088; C07K 14/005; C12N 15/102; C12N 15/1131; C12Y 305/04005; C12N 9/22; C12N 9/78; A61P 31/20; C12Y 305/04004; C12N 15/90

(57) ABSTRACT

The invention features compositions and methods for introducing mutations into the hepatitis B virus (HBV) genome.

### CROSS REFERENCE TO RELATED APPLICATIONS

[0001] This International PCT Application claims priority to and benefit of U.S. Provisional Application No. 62/846,422, filed on May 10, 2019 and U.S. Provisional Application No. 62/927,585, filed on Oct. 29, 2019, the contents of each of which are incorporated by reference herein in their entireties.

### BACKGROUND OF THE INVENTION

[0002] Hepatitis B is a serious liver infection caused by the hepatitis B virus (HBV). HBV is a small DNA hepadnavirus that replicates through an RNA intermediate and can persist in infected cells by integrating into a host's genome. Approximately 257 million people worldwide, including between 850,000 and 2.2 million people in the United States, are chronically infected with HBV. Chronic HBV infection manifests as chronic hepatitis, cirrhosis, and/or hepatocellular carcinoma. Between 20% and 30% of adults who have chronic HBV infection develop hepatocellular carcinoma or cirrhosis. HBV infection is responsible for between 600,000 and 1,000,000 deaths per year.

[0003] Current therapeutic approaches to HBV infection have severe limitations. Antiviral medications, e.g., tenofovir, a nucleotide reverse transcriptase inhibitor, can decrease viral replication but do not cure HBV infected patients. These antiviral therapies can cost patients as much as $500 to $1500 monthly. Due to the extent of liver damage caused by HBV, a transplant becomes necessary in some cases. In addition to the risks inherent in organ transplants, the cost can be prohibitive. Therefore, improved methods for treating HBV infection are urgently required.

### SUMMARY OF THE INVENTION

[0004] As described below, the present invention features compositions and methods for treating hepatitis B virus (HBV) infection by introducing alterations into the HBV genome. In particular embodiments, the invention provides a base editor system (e.g., a fusion protein comprising a programmable DNA binding protein, a nucleobase editor and gRNA) for modifying the HBV genome to introduce changes, such as premature stop codons or in the coding sequence of HBV or deamination of nucleobases in HBV covalently closed circular DNA (cccDNA).

[0005] Provided herein are methods and compositions for editing hepatitis B (HBV) genome and related treatment and uses thereof. In one aspect, provided herein is a method of editing a nucleobase of a hepatitis B virus (HBV) genome, in which the method comprises contacting the HBV genome with one or more guide RNAs and a base editor comprising a polynucleotide programmable DNA binding domain and an adenosine deaminase or cytidine deaminase domain, wherein said guide RNA targets said base editor to effect an alteration of the nucleobase of the HBV genome. In some embodiments, the nucleobase of the HBV genome in a polynucleotide encoding an HBV protein. In some embodiments, the contacting is in a eukaryotic cell, a mammalian cell, or a human cell. In some embodiments, the contacting is in a cell in vivo or ex vivo. In some embodiments, the cytidine deaminase converts a target C to U in the HBV genome. In some embodiments, the cytidine deaminase converts a target C·G to T·A in the polynucleotide encoding the HBV protein. In some embodiments, the adenosine deaminase converts a target A·T to G·C in the polynucleotide encoding the HBV protein.

[0006] In some embodiments of the above-delineated method, the alteration of the nucleobase in the HBV genome in the polynucleotide encoding the HBV protein results in a premature termination codon. In some embodiments, the alteration of the nucleobase results in an R87* or W120* termination in an HBV X protein. In some embodiments, the alteration of the nucleobase results in an W35* or W36* in an HBV S protein. In some embodiments, the alteration of the HBV polynucleotide is a missense mutation. In some embodiments, the missense mutation is in an HBV pol gene. In some embodiments, the missense mutation results in a E24G, L25F, P26F, R27C, V48A, V48I, S382F, V378I, V378A, V379I, V379A, L377F, D380G, D380N, F381P, R376G, A422T, F423P, A432V, M433V, P434S, D540G, A688V, D689G, A717T, E718K, P713S, P713L, or L719P in an HBV polymerase protein encoded by the HBV pol gene. In some embodiments, the missense mutation is in an HBV core gene. In some embodiments, the missense mutation results in a T160A, T160A, P161F, S162L, C183R, or *184Q in an HBV core protein encoded by the HBV core gene. In some embodiments, the missense mutation is in an HBV X gene. In some embodiments, the missense mutation results in a H86R, W120R, E122K, E121K, or L141P in an HBV X protein encoded by the HBV X gene. In certain embodiments, the missense mutation results in a S38F, L39F, W35R, W36R, T37I, T37A, R78Q, S34L, F80P, or D33G in an HBV S protein encoded by the HBV S gene.

[0007] In some embodiments of the above-delineated method, the polynucleotide programmable DNA binding domain provided herein is a Cas9 selected from Streptococcus pyogenes Cas9 (SpCas9), Staphylococcus aureus Cas9 (SaCas9), Streptococcus thermophilus 1 Cas9 (St1Cas9), Streptococcus canis Cas9 (ScCas9), or variant thereof. In some embodiments, the Cas9 has protospacer-adjacent motif (PAM) specificity for a nucleic acid sequence selected from 5′-NGG-3′, 5′-NAG-3′, 5′-NGA-3′, 5′-NAA-3′, 5′-NNAGGA-3′, or 5′-NNACCA-3′. In some embodiments, the polynucleotide programmable DNA binding domain comprises a modified Cas9 having an altered protospacer-adjacent motif (PAM) specificity. In some embodiments, the altered PAM is selected from 5′-NNNRRT-3′, NGA-3′, 5′-NGCG-3′, 5′-NGN-3′, NGCN-3′, 5′-NGTN-3′, or 5′-NAA-3′. In some embodiments, the polynucleotide programmable DNA binding domain is a nuclease inactive or nickase variant. In some embodiments, the nuclease inactive or nickase variant is a nuclease inactivated Cas9 (dCas9) which comprises an amino acid substitution D10A or a corresponding amino acid substitution thereof.

[0008] In some embodiments of the above-delineated method, the adenosine deaminase domain is capable of deaminating adenine in deoxyribonucleic acid (DNA). In some embodiments, the adenosine deaminase is a TadA deaminase. In some embodiments, the TadA deaminase is TadA*7.10, TadA*8.1, TadA*8.2, TadA*8.3, TadA*8.4, TadA*8.5, TadA*8.6, TadA*8.7, TadA*8.8, TadA*8.9, TadA*8.10, TadA*8.11, TadA*8.12, TadA*8.13, TadA*8.14, TadA*8.15, TadA*8.16, TadA*8.17, TadA*8.18, TadA*8.19, TadA*8.20, TadA*8.21, TadA*8.22, TadA*8.23, or TadA*8.24. In some embodiments, the cytidine deaminase domain is capable of deaminating cytidine in DNA. In some embodiments, the cytidine deaminase is APOBEC or a derivative thereof. In some embodiments, the base editor further comprises a uracil glycosylase inhibitor (UGI). In some embodiments, the base editor does not comprise a uracil glycosylase inhibitor (UGI).

[0009] In some embodiments of the above-delineated method, the one or more guide RNAs for editing a nucleobase in the HBV genome comprises a CRISPR RNA (crRNA) and a trans-encoded small RNA (tracrRNA), wherein the crRNA comprises a nucleic acid sequence complementary to an HBV nucleic acid sequence. In some embodiments, the base editor is in complex with a single guide RNA (sgRNA) comprising a nucleic acid sequence complementary to an HBV nucleic acid sequence. In some embodiments, the HBV protein is the HBV S, polymerase (pol), core, or X protein.

[0010] In some aspects, the above-delineated method for editing a nucleobase of a hepatitis B virus (HBV) genome comprises editing one or more nucleobases. In some embodiments, the method comprises two or more guide RNAs that target two or more HBV nucleic acid sequences. In some embodiments, the guide RNAs comprise a sequence, from 5′ to 3′, or a 1, 2, 3, 4, or 5 nucleotide 5′ truncation fragment thereof, selected from one or more of

UCAAUCCCAACAAGGACACC;
GGGAACAAGAUCUACAGCAU;
AAGCCCAGGAUGAUGGGAUG;
CUGCCAACUGGAUCCUGCGC;
GACACAUCCAGCGAUAACCA;
GCUGCCAACUGGAUCCUGCG;
UAUGGAUGAUGUGGUAUUGG;
CCAUGCCCCAAAGCCACCCA;
AAGCCACCCAAGGCACAGCU;
GAGAAGUCCACCACGAGUCU;
CUUCUCUCAAUUUUCUAGGG;
GACGACGAGGCAGGUCCCCU;
CCCAACAAGGACACCUGGCC;
UGCCAACUGGAUCCUGCGCG;
AGGAGUUCCGCAGUAUGGAU;
CCGCAGUAUGGAUCGGCAGA;
CCUCUGCCGAUCCAUACUGC;
CGCCCACCGAAUGUUGCCCA;
GACUUCUCUCAAUUUUCUAG;
GUUCCGCAGUAUGGAUCGGC;
UACUAACAUUGAGGUUCCCG;
UCCGCAGUAUGGAUCGGCAG;
UCCUCUGCCGAUCCAUACUG;
GUAGCUCCAAAUUCUUUAUA;
or
AAUCCACACUCCGAAAGACA.

[0011] In another aspect, a method of treating hepatitis B virus (HBV) infection in a subject is provided, in which the method comprises administering to a subject in need thereof a fusion protein or polynucleotide encoding said fusion protein, the fusion protein comprising a polynucleotide programmable DNA binding domain and a base editor domain that is an adenosine deaminase or a cytidine deaminase domain and one or more guide polynucleotides that target the base editor domain to effect an A·T to G·C, C·G to T·A, or C·G to U·A alteration of the nucleic acid sequence encoding an HBV polypeptide.

[0012] In another aspect, a method of treating hepatitis B virus (HBV) infection in a subject is provided, in which the method comprises administering to a subject in need thereof one or more polynucleotides encoding a polynucleotide programmable DNA binding domain and a base editor domain that is an adenosine deaminase or a cytidine deaminase domain, and one or more guide polynucleotides that target the base editor domain to effect an A·T to G·C, C·G to T·A, or C·G to U·A alteration of the nucleic acid sequence encoding an HBV polypeptide.

[0013] In some embodiments of the above-delineated treatment methods, the subject is a mammal or a human. In some embodiments, the methods comprise delivering the fusion protein, the polynucleotide encoding said fusion protein, or the one or more polynucleotides encoding a polynucleotide programmable DNA binding domain and the base editor domain, and said one or more guide polynucleotides to a cell of the subject. In some embodiments, the cell is a hepatocyte. In some embodiments, the polynucleotide programmable DNA binding domain is a Cas9 selected from Streptococcus pyogenes Cas9 (SpCas9), Staphylococcus aureus Cas9 (SaCas9), Streptococcus thermophilus I Cas9 (St1Cas9), Streptococcus canis Cas9 (ScCas9), or a variant thereof. In some embodiments, the Cas9 has protospacer-adjacent motif (PAM) specificity for a nucleic acid sequence selected from 5′-NGG-3′, 5′-NAG-3′, 5′-NGA-3′, 5′-NAA-3′, 5′-NNAGGA-3′, or 5′-NNACCA-3′. In some embodiments, the polynucleotide programmable DNA binding domain comprises a modified Cas9 having an altered protospacer-adjacent motif (PAM) specificity. In some embodiments, the nucleic acid sequence of the altered PAM is selected from 5′-NNNRRT-3′, NGA-3′, 5′-NGCG-3′, 5′-NGN-3′, NGCN-3′, 5′-NGTN-3′, or 5′-NAA-3′. In some embodiments, the polynucleotide programmable DNA binding domain is a nuclease inactive or nickase variant. In some embodiments, the nuclease inactive or nickase variant is a nuclease inactivated Cas9 (dCas9) which comprises an amino acid substitution D10A or a corresponding amino acid substitution thereof. In some embodiments, the adenosine deaminase domain is capable of deaminating adenine in deoxyribonucleic acid (DNA). In some embodiments, adenosine deaminase is a TadA deaminase. In some embodiments, the TadA deaminase is TadA*7.10, TadA*8.1, TadA*8.2, TadA*8.3, TadA*8.4, TadA*8.5, TadA*8.6, TadA*8.7, TadA*8.8, TadA*8.9, TadA*8.10, TadA*8.11, TadA*8.12, TadA*8.13, TadA*8.14, TadA*8.15, TadA*8.16, TadA*8.17, TadA*8.18, TadA*8.19, TadA*8.20, TadA*8.21, TadA*8.22, TadA*8.23, or TadA*8.24. In some embodiments, the cytidine deaminase domain is capable of deaminating cytidine in DNA. In some embodiments, the cytidine deaminase is APOBEC or a derivative thereof. In some embodiments, the base editor further comprises one or more uracil glycosylase inhibitors (UGIs). In some embodiments, the base editor does not comprise a uracil glycosylase inhibitor (UGI). In some embodiments, the one or more guide RNAs comprises a CRISPR RNA (crRNA) and a trans-encoded small RNA (tracrRNA), wherein the crRNA comprises a nucleic acid sequence complementary to an HBV nucleic acid sequence. In some embodiments, the base editor is in complex with a single guide RNA (sgRNA) comprising a nucleic acid sequence complementary to an HBV nucleic acid sequence. In some embodiment, the sgRNA comprises a nucleic acid sequence comprising at least 10 contiguous nucleotides that are complementary to the HBV nucleic acid sequence. In some embodiments, the sgRNA comprises a nucleic acid sequence comprising 15, 16, 17, 18, 19, 20, 21, 22, 23, 24, 25, 26, 27, 28, 29, 30, 31, 32, 33, 34, 35, 36, 37, 38, 39, or 40 contiguous nucleotides that are complementary to the HBV nucleic acid sequence.

[0014] In some embodiments, the above-delineated methods comprise editing one or more nucleobases. In some embodiments, the above described methods comprise two or more guide RNAs that target two or more HBV nucleic acid sequences. In some embodiments, the above-delineated methods comprise two or more guide RNAs that target three, four, or five HBV nucleic acid sequences. In some embodiments of the above-delineated methods, the HBV nucleic acid sequences encode one or more HBV proteins selected from HBV polymerase, HBV core protein, HBV S protein, HBV X protein, or a combination thereof. In some embodiments of the above-delineated methods, the one or more guide RNAs comprise a sequence, from 5′ to 3′, or a 1, 2, 3, 4, or 5 nucleotide 5′ truncation fragment thereof, selected from one or more of UCAAUCCCAACAAGGACACC; GGGAACAAGAUCUACAGCAU; AAGCCCAGGAUGAUGGGAUG; CUGCCAACUGGAUCCUGCGC; GACACAUCCAGCGAUAACCA; GCUGCCAACUGGAUCCUGCG; UAUGGAUGAUGUGGUAUUGG; CCAUGCCCCAAAGCCACCCA; AAGCCACCCAAGGCACAGCU; GAGAAGUCCACCACGAGUCU; CUUCUCUCAAUUUUCUAGGG; GACGACGAGGCAGGUCCCCU; CCCAACAAGGACACCUGGCC; UGCCAACUGGAUCCUGCGCG; AGGAGUUCCGCAGUAUGGAU; CCGCAGUAUGGAUCGGCAGA; CCUCUGCCGAUCCAUACUGC; CGCCCACCGAAUGUUGCCCA; GACUUCUCUCAAUUUUCUAG; GUUCCGCAGUAUGGAUCGGC; UACUAACAUUGAGGUUCCCG; UCCGCAGUAUGGAUCGGCAG; UCCUCUGCCGAUCCAUACUG; GUAGCUCCAAAUUCUUUAUA; or AAUCCACACUCCGAAAGACA. In some embodiments, the alteration of the polynucleotide encoding the HBV protein is a premature termination codon. In some embodiments, the alteration of the nucleic acid sequence results in an R87* or W120* in an HBV X protein encoded by the nucleic acid. In some embodiments, the alteration of the nucleic acid sequence results in a W35* or W36* in an HBV S protein encoded by the nucleic acid. In some embodiments, the alteration of the polynucleotide encoding the HBV protein is a missense mutation. In some embodiments, the missense mutation is in an HBV pol gene. In some embodiments, the missense mutation in the HBV pol gene results in a E24G, L25F, P26F, R27C, V48A, V48I, S382F, V378I, V378A, V379I, V379A, L377F, D380G, D380N, F381P, R376G, A422T, F423P, A432V, M433V, P434S, D540G, A688V, D689G, A717T, E718K, P713S, P713L, or L719P in an HBV polymerase encoded by the HBV pol gene. In some embodiments, the missense mutation is in an HBV core gene. In some embodiments, the missense mutation in the HBV core gene results in a T160A, T160A, P161F, S162L, C183R, or *184Q in an HBV core protein encoded by the HBV core gene. In some embodiments, the missense mutation is in an HBV X gene. In some embodiments, the missense mutation results in a H86R, W120R, E122K, E121K, or L141P in an HBV X protein encoded by the HBV X gene. In some embodiments, the missense mutation is in an HBV S gene. In some embodiments, the missense mutation results in a S38F, L39F, W35R, W36R, T37I, T37A, R78Q, S34L, F80P, or D33G in an HBV S protein encoded by the HBV S gene. In some embodiments, the base editor is a BE4 or a variant of BE4 where APOBEC-1 is replaced with the sequence of APOBEC-3A, and/or Cas9 is replaced with a Cas9 variant comprising V1134, R1217, Q1334, and R1336 (termed SpCas9-VRQR).

[0015] In an aspect, compositions are provided, e.g., for treatment of HBV infection. In one aspect, composition is provided, in which the composition comprises a base editor bound to a guide RNA, wherein the guide RNA comprises a nucleic acid sequence that is complementary to an HBV gene. In an embodiment, the base editor is an adenosine deaminase or a cytidine deaminase. In an embodiment, the adenosine deaminase is capable of deaminating adenine in deoxyribonucleic acid (DNA). In an embodiment, the adenosine deaminase is a TadA deaminase. In an embodiment, the TadA deaminase is TadA*7.10, TadA*8.1, TadA*8.2, TadA*8.3, TadA*8.4, TadA*8.5, TadA*8.6, TadA*8.7, TadA*8.8, TadA*8.9, TadA*8.10, TadA*8.11, TadA*8.12, TadA*8.13, TadA*8.14, TadA*8.15, TadA*8.16, TadA*8.17, TadA*8.18, TadA*8.19, TadA*8.20, TadA*8.21, TadA*8.22, TadA*8.23, or TadA*8.24. In an embodiment, the cytidine deaminase domain is capable of deaminating cytidine in DNA. In an embodiment, the cytidine deaminase is APOBEC or a derivative thereof. In an embodiment, the base editor further comprises one or more uracil glycosylase inhibitors (UGIs). In an embodiment, the base editor does not comprise a uracil glycosylase inhibitor (UGI). In an embodiment, the base editor (i) comprises a Cas9 nickase;

[0016] (ii) comprises a nuclease inactive Cas9;

[0017] (iii) does not comprise a UGI domain;

[0018] (iv) comprises an APOBEC-1 or APOBEC-3A cytidine deaminase;

[0019] (v) comprises an amino acid sequence that is at least 80%, 85%, 90%, 95%, 96%, 97%, 98%, 99%, or 100% identical to MSSETGPVAVDPTLRRRIEPHEFEVFFDPRELRKETCLLYEINWGGRHSIWRHTSQN TNKHVEVNFIEKFTTERYFCPNTRCSITWFLSWSPCGECSRAITEFLSRYPHVTLFIYIARL YHHADPRNRQGLRDLISSGVTIQIMTEQESGYCWRNFVNYSPSNEAHWPRYPHLWVRLYVLE LYCIILGLPPCLNILRRKQPQLTFFTIALQSCHYQRLPPHILWATGLKSGGSSGGSSGSETP GTSESATPESSGGSSGGSDKKYSIGLAIGTNSVGWAVITDEYKVPSKKFKVLGNTDRHSIKK NLIGALLFDSGETAEATRLKRTARRRYTRRKNRICYLQEIFSNEMAKVDDSFFHRLEESFLV EEDKKHERHPIFGNIVDEVAYHEKYPTIYHLRKKLVDSTDKADLRLIYLALAHMIKFRGHFL IEGDLNPDNSDVDKLFIQLVQTYNQLFEENPINASGVDAKAILSARLSKSRRLENLIAQLPG EKKNGLFGNLIALSLGLTPNFKSNFDLAEDAKLQLSKDTYDDDLDNLLAQIGDQYADLFLAA KNLSDAILLSDILRVNTEITKAPLSASMIKRYDEHHQDLTLLKALVRQQLPEKYKEIFFDQS KNGYAGYIDGGASQEEFYKFIKPILEKMDGTEELLVKLNREDLLRKQRTFDNGSIPHQIHLG ELHAILRRQEDFYPFLKDNREKIEKILTFRIPYYVGPLARGNSRFAWMTRKSEETITPWNFE EVVDKGASAQSFIERMTNFDKNLPNEKVLPKHSLLYEYFTVYNELTKVKYVTEGMRKPAFLS GEQKKAIVDLLFKTNRKVTVKQLKEDYFKKIECFDSVEISGVEDRFNASLGTYHDLLKIIKD KDFLDNEENEDILEDIVLTLTLFEDREMIEERLKTYAHLFDDKVMKQLKRRRYTGWGRLSRK LINGIRDKQSGKTILDFLKSDGFANRNFMQLIHDDSLTFKEDIQKAQVSGQGDSLHEHIANL AGSPAIKKGILQTVKVVDELVKVMGRHKPENIVIEMARENQTTQKGQKNSRERMKRIEEGIK ELGSQILKEHPVENTQLQNEKLYLYYLQNGRDMYVDQELDINRLSDYDVDAIVPQSFLKDDS IDNKVLTRSDKNRGKSDNVPSEEVVKKMKNYWRQLLNAKLITQRKFDNLTKAERGGLSELDK AGFIKRQLVETRQITKHVAQILDSRMNTKYDENDKLIREVKVITLKSKLVSDFRKDFQFYKV REINNYHHAHDAYLNAVVGTALIKKYPKLESEFVYGDYKVYDVRKMIAKSEQEIGKATAKYF FYSNIMNFFKTEITLANGEIRKRPLIETNGETGEIVWDKGRDFATVRKVLSMPQVNIVKKTE VQTGGFSKESILPKRNSDKLIARKKDWDPKKYGGFDSPTVAYSVLVVAKVEKGKSKKLKSVK ELLGITIMERSSFEKNPIDFLEAKGYKEVKKDLIIKLPKYSLFELENGRKRMLASAGELQKG NELALPSKYVNFLYLASHYEKLKGSPEDNEQKQLFVEQHKHYLDEIIEQISEFSKRVILADA NLDKVLSAYNKHRDKPIREQAENIIHLFTLTNLGAPAAFKYFDTTIDRKRYTSTKEVLDATL IHQSITGLYETRIDLSQLGGDSGGSKRTADGSEFESPKKKRKVE; or

[0020] (vi) comprises an amino acid sequence that is at least 80%, 85%, 90%, 95%, 96%, 97%, 98%, 99%, or 100% identical to MSSETGPVAVDPTLRRRIEPHEFEVFFDPRELRKETCLLYEINWGGRHSIWRHTSQNTNKHV EVNFIEKFTTERYFCPNTRCSITWFLSWSPCGECSRAITEFLSRYPHVTLFIYIARLYHHAD PRNRQGLRDLISSGVTIQIMTEQESGYCWRNFVNYSPSNEAHWPRYPHLWVRLYVLELYCII LGLPPCLNILRRKQPQLTFFTIALQSCHYQRLPPHILWATGLKSGGSSGGSSGSETPGTSES ATPESSGGSSGGSDKKYSIGLAIGTNSVGWAVITDEYKVPSKKFKVLGNTDRHSIKKNLIGA LLFDSGETAEATRLKRTARRRYTRRKNRICYLQEIFSNEMAKVDDSFFHRLEESFLVEEDKK HERHPIFGNIVDEVAYHEKYPTIYHLRKKLVDSTDKADLRLIYLALAHMIKFRGHFLIEGDL NPDNSDVDKLFIQLVQTYNQLFEENPINASGVDAKAILSARLSKSRRLENLIAQLPGEKKNG LFGNLIALSLGLTPNFKSNFDLAEDAKLQLSKDTYDDDLDNLLAQIGDQYADLFLAAKNLSD AILLSDILRVNTEITKAPLSASMIKRYDEHHQDLTLLKALVRQQLPEKYKEIFFDQSKNGYA GYIDGGASQEEFYKFIKPILEKMDGTEELLVKLNREDLLRKQRTFDNGSIPHQIHLGELHAI LRRQEDFYPFLKDNREKIEKILTFRIPYYVGPLARGNSRFAWMTRKSEETITPWNFEEVVDK GASAQSFIERMTNFDKNLPNEKVLPKHSLLYEYFTVYNELTKVKYVTEGMRKPAFLSGEQKK AIVDLLFKTNRKVTVKQLKEDYFKKIECFDSVEISGVEDRFNASLGTYHDLLKIIKDKDFLD NEENEDILEDIVLTLTLFEDREMIEERLKTYAHLFDDKVMKQLKRRRYTGWGRLSRKLINGI RDKQSGKTILDFLKSDGFANRNFMQLIHDDSLTFKEDIQKAQVSGQGDSLHEHIANLAGSPA IKKGILQTVKVVDELVKVMGRHKPENIVIEMARENQTTQKGQKNSRERMKRIEEGIKELGSQ ILKEHPVENTQLQNEKLYLYYLQNGRDMYVDQELDINRLSDYDVDHIVPQSFLKDDSIDNKV LTRSDKNRGKSDNVPSEEVVKKMKNYWRQLLNAKLITQRKFDNLTKAERGGLSELDKAGFIK RQLVETRQITKHVAQILDSRMNTKYDENDKLIREVKVITLKSKLVSDFRKDFQFYKVREINN YHHAHDAYLNAVVGTALIKKYPKLESEFVYGDYKVYDVRKMIAKSEQEIGKATAKYFFYSNI MNFFKTEITLANGEIRKRPLIETNGETGEIVWDKGRDFATVRKVLSMPQVNIVKKTEVQTGG FSKESILPKRNSDKLIARKKDWDPKKYGGFDSPTVAYSVLVVAKVEKGKSKKLKSVKELLGI TIMERSSFEKNPIDFLEAKGYKEVKKDLIIKLPKYSLFELENGRKRMLASAGELQKGNELAL PSKYVNFLYLASHYEKLKGSPEDNEQKQLFVEQHKHYLDEIIEQISEFSKRVILADANLDKV LSAYNKHRDKPIREQAENIIHLFTLTNLGAPAAFKYFDTTIDRKRYTSTKEVLDATLIHQSI TGLYETRIDLSQLGGDSGGSKRTADGSEFESPKKKRKVE.

In an embodiment, the guide RNA of the composition comprises a nucleic acid sequence that is complementary to an HBV gene encoding an HBV polymerase, HBV core protein, HBV S protein, or HBV X protein. In an embodiment, the guide RNA comprises 15, 16, 17, 18, 19, 20, 21, 22, 23, 24, 25, 26, 27, 28, 29, or 30 contiguous nucleotides that are perfectly complementary to an HBV gene that encodes an HBV X protein. In an embodiment, the guide RNA comprises 15, 16, 17, 18, 19, 20, 21, 22, 23, 24, 25, 26, 27, 28, 29, or 30 contiguous nucleotides that are perfectly complementary to an HBV gene that encodes an HBV S protein. In an embodiment, the guide RNA comprises 15, 16, 17, 18, 19, 20, 21, 22, 23, 24, 25, 26, 27, 28, 29, or 30 contiguous nucleotides that are perfectly complementary to an HBV gene that encodes an HBV polymerase. In an embodiment, the guide RNA comprises 15, 16, 17, 18, 19, 20, 21, 22, 23, 24, 25, 26, 27, 28, 29, or 30 contiguous nucleotides that are perfectly complementary to an HBV gene that encodes an HBV core protein. In an embodiment, the guide RNA comprises a 1, 2, 3, 4, or 5 nucleic acid truncation from the 5′ end of a nucleic acid selected from the group consisting of, from 5′ to 3′, UCAAUCCCAACAAGGACACC; GGGAACAAGAUCUACAGCAU; AAGCCCAGGAUGAUGGGAUG; CUGCCAACUGGAUCCUGCGC; GACACAUCCAGCGAUAACCA; GCUGCCAACUGGAUCCUGCG; UAUGGAUGAUGUGGUAUUGG; CCAUGCCCCAAAGCCACCCA; AAGCCACCCAAGGCACAGCU; GAGAAGUCCACCACGAGUCU; CUUCUCUCAAUUUUCUAGGG; GACGACGAGGCAGGUCCCCU; CCCAACAAGGACACCUGGCC; UGCCAACUGGAUCCUGCGCG; AGGAGUUCCGCAGUAUGGAU; CCGCAGUAUGGAUCGGCAGA; CCUCUGCCGAUCCAUACUGC; CGCCCACCGAAUGUUGCCCA; GACUUCUCUCAAUUUUCUAG; GUUCCGCAGUAUGGAUCGGC; UACUAACAUUGAGGUUCCCG; UCCGCAGUAUGGAUCGGCAG; UCCUCUGCCGAUCCAUACUG; GUAGCUCCAAAUUCUUUAUA; and AAUCCACACUCCGAAAGACA. In an embodiment, the guide RNA comprises a nucleic acid selected from the group consisting of, from 5′ to 3′, UCAAUCCCAACAAGGACACC; GGGAACAAGAUCUACAGCAU; AAGCCCAGGAUGAUGGGAUG; CUGCCAACUGGAUCCUGCGC; GACACAUCCAGCGAUAACCA; GCUGCCAACUGGAUCCUGCG; UAUGGAUGAUGUGGUAUUGG; CCAUGCCCCAAAGCCACCCA; AAGCCACCCAAGGCACAGCU; GAGAAGUCCACCACGAGUCU; CUUCUCUCAAUUUUCUAGGG; GACGACGAGGCAGGUCCCCU; CCCAACAAGGACACCUGGCC; UGCCAACUGGAUCCUGCGCG; AGGAGUUCCGCAGUAUGGAU; CCGCAGUAUGGAUCGGCAGA; CCUCUGCCGAUCCAUACUGC; CGCCCACCGAAUGUUGCCCA; GACUUCUCUCAAUUUUCUAG; GUUCCGCAGUAUGGAUCGGC; UACUAACAUUGAGGUUCCCG; UCCGCAGUAUGGAUCGGCAG; UCCUCUGCCGAUCCAUACUG; GUAGCUCCAAAUUCUUUAUA; and AAUCCACACUCCGAAAGACA. In an embodiment, the above-delineated composition further comprises a lipid. In an embodiment, the lipid is a cationic lipid. In an embodiment, the composition further comprises a pharmaceutically acceptable excipient.

[0021] In another aspect, a pharmaceutical composition is provided, in which the pharmaceutical composition comprises a base editor, or a nucleic acid encoding the base editor, and one or more guide RNAs (gRNAs) comprising a nucleic acid sequence complementary to an HBV gene in a pharmaceutically acceptable excipient. In an embodiment, the base editor (i) comprises a Cas9 nickase;

[0022] (ii) comprises a nuclease inactive Cas9;

[0023] (iii) does not comprise a UGI domain;

[0024] (iv) comprises an APOBEC-1 or APOBEC-3A cytidine deaminase;

[0025] (v) comprises an amino acid sequence that is at least 80%, 85%, 90%, 95%, 96%, 97%, 98%, 99%, or 100% identical to MSSETGPVAVDPTLRRRIEPHEFEVFFDPRELRKETCLLYEINWGGRHSIWRHTSQNTNKHV EVNFIEKFTTERYFCPNTRCSITWFLSWSPCGECSRAITEFLSRYPHVTLFIYIARLYHHAD PRNRQGLRDLISSGVTIQIMTEQESGYCWRNFVNYSPSNEAHWPRYPHLWVRLYVLELYCII LGLPPCLNILRRKQPQLTFFTIALQSCHYQRLPPHILWATGLKSGGSSGGSSGSETPGTSES ATPESSGGSSGGSDKKYSIGLAIGTNSVGWAVITDEYKVPSKKFKVLGNTDRHSIKKNLIGA LLFDSGETAEATRLKRTARRRYTRRKNRICYLQEIFSNEMAKVDDSFFHRLEESFLVEEDKK HERHPIFGNIVDEVAYHEKYPTIYHLRKKLVDSTDKADLRLIYLALAHMIKFRGHFLIEGDL NPDNSDVDKLFIQLVQTYNQLFEENPINASGVDAKAILSARLSKSRRLENLIAQLPGEKKNG LFGNLIALSLGLTPNFKSNFDLAEDAKLQLSKDTYDDDLDNLLAQIGDQYADLFLAAKNLSD AILLSDILRVNTEITKAPLSASMIKRYDEHHQDLTLLKALVRQQLPEKYKEIFFDQSKNGYA GYIDGGASQEEFYKFIKPILEKMDGTEELLVKLNREDLLRKQRTFDNGSIPHQIHLGELHAI LRRQEDFYPFLKDNREKIEKILTFRIPYYVGPLARGNSRFAWMTRKSEETITPWNFEEVVDK GASAQSFIERMTNFDKNLPNEKVLPKHSLLYEYFTVYNELTKVKYVTEGMRKPAFLSGEQKK AIVDLLFKTNRKVTVKQLKEDYFKKIECFDSVEISGVEDRFNASLGTYHDLLKIIKDKDFLD NEENEDILEDIVLTLTLFEDREMIEERLKTYAHLFDDKVMKQLKRRRYTGWGRLSRKLINGI RDKQSGKTILDFLKSDGFANRNFMQLIHDDSLTFKEDIQKAQVSGQGDSLHEHIANLAGSPA IKKGILQTVKVVDELVKVMGRHKPENIVIEMARENQTTQKGQKNSRERMKRIEEGIKELGSQ ILKEHPVENTQLQNEKLYLYYLQNGRDMYVDQELDINRLSDYDVDAIVPQSFLKDDSIDNKV LTRSDKNRGKSDNVPSEEVVKKMKNYWRQLLNAKLITQRKFDNLTKAERGGLSELDKAGFIK RQLVETRQITKHVAQILDSRMNTKYDENDKLIREVKVITLKSKLVSDFRKDFQFYKVREINN YHHAHDAYLNAVVGTALIKKYPKLESEFVYGDYKVYDVRKMIAKSEQEIGKATAKYFFYSNI MNFFKTEITLANGEIRKRPLIETNGETGEIVWDKGRDFATVRKVLSMPQVNIVKKTEVQTGG FSKESILPKRNSDKLIARKKDWDPKKYGGFDSPTVAYSVLVVAKVEKGKSKKLKSVKELLGI TIMERSSFEKNPIDFLEAKGYKEVKKDLIIKLPKYSLFELENGRKRMLASAGELQKGNELAL PSKYVNFLYLASHYEKLKGSPEDNEQKQLFVEQHKHYLDEIIEQISEFSKRVILADANLDKV LSAYNKHRDKPIREQAENIIHLFTLTNLGAPAAFKYFDTTIDRKRYTSTKEVLDATLIHQSI TGLYETRIDLSQLGGDSGGSKRTADGSEFESPKKKRKVE; or

[0026] (vi) comprises an amino acid sequence that is at least 80%, 85%, 90%, 95%, 96%, 97%, 98%, 99%, or 100% identical to MSSETGPVAVDPTLRRRIEPHEFEVFFDPRELRKETCLLYEINWGGRHSIWRHTSQNTNKHV EVNFIEKFTTERYFCPNTRCSITWFLSWSPCGECSRAITEFLSRYPHVTLFIYIARLYHHAD PRNRQGLRDLISSGVTIQIMTEQESGYCWRNFVNYSPSNEAHWPRYPHLWVRLYVLELYCII LGLPPCLNILRRKQPQLTFFTIALQSCHYQRLPPHILWATGLKSGGSSGGSSGSETPGTSES ATPESSGGSSGGSDKKYSIGLAIGTNSVGWAVITDEYKVPSKKFKVLGNTDRHSIKKNLIGA LLFDSGETAEATRLKRTARRRYTRRKNRICYLQEIFSNEMAKVDDSFFHRLEESFLVEEDKK HERHPIFGNIVDEVAYHEKYPTIYHLRKKLVDSTDKADLRLIYLALAHMIKFRGHFLIEGDL NPDNSDVDKLFIQLVQTYNQLFEENPINASGVDAKAILSARLSKSRRLENLIAQLPGEKKNG LFGNLIALSLGLTPNFKSNFDLAEDAKLQLSKDTYDDDLDNLLAQIGDQYADLFLAAKNLSD AILLSDILRVNTEITKAPLSASMIKRYDEHHQDLTLLKALVRQQLPEKYKEIFFDQSKNGYA GYIDGGASQEEFYKFIKPILEKMDGTEELLVKLNREDLLRKQRTFDNGSIPHQIHLGELHAI LRRQEDFYPFLKDNREKIEKILTFRIPYYVGPLARGNSRFAWMTRKSEETITPWNFEEVVDK GASAQSFIERMTNFDKNLPNEKVLPKHSLLYEYFTVYNELTKVKYVTEGMRKPAFLSGEQKK AIVDLLFKTNRKVTVKQLKEDYFKKIECFDSVEISGVEDRFNASLGTYHDLLKIIKDKDFLD NEENEDILEDIVLTLTLFEDREMIEERLKTYAHLFDDKVMKQLKRRRYTGWGRLSRKLINGI RDKQSGKTILDFLKSDGFANRNFMQLIHDDSLTFKEDIQKAQVSGQGDSLHEHIANLAGSPA IKKGILQTVKVVDELVKVMGRHKPENIVIEMARENQTTQKGQKNSRERMKRIEEGIKELGSQ ILKEHPVENTQLQNEKLYLYYLQNGRDMYVDQELDINRLSDYDVDHIVPQSFLKDDSIDNKV LTRSDKNRGKSDNVPSEEVVKKMKNYWRQLLNAKLITQRKFDNLTKAERGGLSELDKAGFIK RQLVETRQITKHVAQILDSRMNTKYDENDKLIREVKVITLKSKLVSDFRKDFQFYKVREINN YHHAHDAYLNAVVGTALIKKYPKLESEFVYGDYKVYDVRKMIAKSEQEIGKATAKYFFYSNI MNFFKTEITLANGEIRKRPLIETNGETGEIVWDKGRDFATVRKVLSMPQVNIVKKTEVQTGG FSKESILPKRNSDKLIARKKDWDPKKYGGFDSPTVAYSVLVVAKVEKGKSKKLKSVKELLGI TIMERSSFEKNPIDFLEAKGYKEVKKDLIIKLPKYSLFELENGRKRMLASAGELQKGNELAL PSKYVNFLYLASHYEKLKGSPEDNEQKQLFVEQHKHYLDEIIEQISEFSKRVILADANLDKV LSAYNKHRDKPIREQAENIIHLFTLTNLGAPAAFKYFDTTIDRKRYTSTKEVLDATLIHQSI TGLYETRIDLSQLGGDSGGSKRTADGSEFESPKKKRKVE.

In an embodiment, the base editor comprises a Cas9, or a Cas9 variant comprising V1134, R1217, Q1334, and R1336 (SpCas9-VRQR). In an embodiment, the gRNA and the base editor are formulated together or separately. In an embodiment, the gRNA comprises a nucleic acid sequence, from 5′ to 3′, or a 1, 2, 3, 4, or 5 nucleotide 5′ truncation fragment thereof, selected from one or more of UCAAUCCCAACAAGGACACC; GGGAACAAGAUCUACAGCAU AAGCCCAGGAUGAUGGGAUG; CUGCCAACUGGAUCCUGCGC GACACAUCCAGCGAUAACCA; GCUGCCAACUGGAUCCUGCG UAUGGAUGAUGUGGUAUUGG; CCAUGCCCCAAAGCCACCCA AAGCCACCCAAGGCACAGCU; GAGAAGUCCACCACGAGUCU CUUCUCUCAAUUUUCUAGGG; GACGACGAGGCAGGUCCCCU CCCAACAAGGACACCUGGCC; UGCCAACUGGAUCCUGCGCG AGGAGUUCCGCAGUAUGGAU; CCGCAGUAUGGAUCGGCAGA CCUCUGCCGAUCCAUACUGC; CGCCCACCGAAUGUUGCCCA GACUUCUCUCAAUUUUCUAG; GUUCCGCAGUAUGGAUCGGC UACUAACAUUGAGGUUCCCG; UCCGCAGUAUGGAUCGGCAG UCCUCUGCCGAUCCAUACUG; GUAGCUCCAAAUUCUUUAUA; or AAUCCACACUCCGAAAGACA. In an embodiment, the pharmaceutical composition further comprises a vector suitable for expression in a mammalian cell, wherein the vector comprises a polynucleotide encoding the base editor. In an embodiment, the vector is a viral vector. In an embodiment, the viral vector is a retroviral vector, adenoviral vector, lentiviral vector, herpesvirus vector, or adeno-associated viral vector (AAV). In an embodiment, the pharmaceutical composition further comprises a ribonucleoparticle suitable for expression in a mammalian cell.

[0027] In another aspect, a method of treating HBV infection is provided, in which the method comprises administering to a subject in need thereof the above-delineated composition or pharmaceutical composition.

[0028] Another aspect provides an HBV genome comprising an alteration selected from the group consisting of:

[0029] a premature termination codon introducing a R87STOP or W120STOP in the X gene;

[0030] a premature termination codon introducing a W35STOP or W36STOP in the S gene;

[0031] a missense mutation in the HBV pol gene that introduces a E24G, L25F, P26F, R27C, V48A, V48I, S382F, V378I, V378A, V379I, V379A, L377F, D380G, D380N, F381P, R376G, A422T, F423P, A432V, M433V, P434S, D540G, A688V, D689G, A717T, E718K, P713S, P713L, or L719P in HBV polymerase;

[0032] a missense mutation is in the HBV core gene that introduces a T160A, T160A, P161F, S162L, C183R, or STOP184Q in the HBV Core polypeptide;

[0033] a missense mutation is in the X gene that introduces a H86R, W120R, E122K, E121K, or L141P in the HBV X polypeptide; and

[0034] a missense mutation in the S gene that introduces a S38F, L39F, W35R, W36R, T37I, T37A, R78Q, S34L, F80P, or D33G in the HBV S polypeptide.

In an embodiment, the HBV genome comprises two or more of the above described alterations.

[0035] In embodiments of the above-delineated methods, or the above-delineated HBV genome, the HBV is of genotype C or genotype D.

[0036] Provided in another aspect is a use of the composition of any of the above-delineated aspects and embodiments in the treatment of HBV infection in a subject.

[0037] Provided in another aspect is a use of the pharmaceutical composition of any of the above-delineated aspects and embodiments in the treatment of HBV infection in a subject.

[0038] In an embodiment of the above-delineated uses, the subject is a mammal. In an embodiment of the above-delineated uses, the subject is a human.

[0039] In an embodiment of the above-delineated methods or pharmaceutical compositions, the one or more guide RNAs are as listed in Table 26.

[0040] In another aspect, a guide RNA (gRNA) is provided which comprises a nucleic acid sequence that is complementary to an HBV gene. In an embodiment, the guide RNA comprises a nucleic acid sequence that is complementary to an HBV gene encoding an HBV polymerase, HBV core protein, HBV S protein, or HBV X protein. In an embodiment, the guide RNA comprises 15, 16, 17, 18, 19, 20, 21, 22, 23, 24, 25, 26, 27, 28, 29, or 30 contiguous nucleotides that are perfectly complementary to an HBV gene that encodes an HBV X protein. In an embodiment, the guide RNA comprises 15, 16, 17, 18, 19, 20, 21, 22, 23, 24, 25, 26, 27, 28, 29, or 30 contiguous nucleotides that are perfectly complementary to an HBV gene that encodes an HBV S protein. In an embodiment, the guide RNA comprises 15, 16, 17, 18, 19, 20, 21, 22, 23, 24, 25, 26, 27, 28, 29, or 30 contiguous nucleotides that are perfectly complementary to an HBV gene that encodes an HBV polymerase. In an embodiment, the guide RNA comprises 15, 16, 17, 18, 19, 20, 21, 22, 23, 24, 25, 26, 27, 28, 29, or 30 contiguous nucleotides that are perfectly complementary to an HBV gene that encodes an HBV core protein. In an embodiment, the guide RNA comprises a 1, 2, 3, 4, or 5 nucleic acid truncation from the 5′ end of a nucleic acid selected from the group consisting of, from 5′ to 3′, UCAAUCCCAACAAGGACACC; GGGAACAAGAUCUACAGCAU; AAGCCCAGGAUGAUGGGAUG; CUGCCAACUGGAUCCUGCGC; GACACAUCCAGCGAUAACCA; GCUGCCAACUGGAUCCUGCG; UAUGGAUGAUGUGGUAUUGG; CCAUGCCCCAAAGCCACCCA; AAGCCACCCAAGGCACAGCU; GAGAAGUCCACCACGAGUCU; CUUCUCUCAAUUUUCUAGGG; GACGACGAGGCAGGUCCCCU; CCCAACAAGGACACCUGGCC; UGCCAACUGGAUCCUGCGCG; AGGAGUUCCGCAGUAUGGAU; CCGCAGUAUGGAUCGGCAGA; CCUCUGCCGAUCCAUACUGC; CGCCCACCGAAUGUUGCCCA; GACUUCUCUCAAUUUUCUAG; GUUCCGCAGUAUGGAUCGGC; UACUAACAUUGAGGUUCCCG; UCCGCAGUAUGGAUCGGCAG; UCCUCUGCCGAUCCAUACUG; GUAGCUCCAAAUUCUUUAUA; and AAUCCACACUCCGAAAGACA. In an embodiment, the guide RNA comprises a nucleic acid selected from the group consisting of, from 5′ to 3′, UCAAUCCCAACAAGGACACC; GGGAACAAGAUCUACAGCAU; AAGCCCAGGAUGAUGGGAUG; CUGCCAACUGGAUCCUGCGC; GACACAUCCAGCGAUAACCA; GCUGCCAACUGGAUCCUGCG; UAUGGAUGAUGUGGUAUUGG; CCAUGCCCCAAAGCCACCCA; AAGCCACCCAAGGCACAGCU; GAGAAGUCCACCACGAGUCU; CUUCUCUCAAUUUUCUAGGG; GACGACGAGGCAGGUCCCCU; CCCAACAAGGACACCUGGCC; UGCCAACUGGAUCCUGCGCG; AGGAGUUCCGCAGUAUGGAU; CCGCAGUAUGGAUCGGCAGA; CCUCUGCCGAUCCAUACUGC; CGCCCACCGAAUGUUGCCCA; GACUUCUCUCAAUUUUCUAG; GUUCCGCAGUAUGGAUCGGC; UACUAACAUUGAGGUUCCCG; UCCGCAGUAUGGAUCGGCAG; UCCUCUGCCGAUCCAUACUG; GUAGCUCCAAAUUCUUUAUA; and AAUCCACACUCCGAAAGACA.

[0041] In another aspect, a pharmaceutical composition is provided, in which the pharmaceutical composition comprises (i) a nucleic acid encoding a base editor; and (ii) the guide RNA of any of the above-delineated aspects and embodiments. In an embodiment, the pharmaceutical composition further comprises a lipid. In an embodiment of the pharmaceutical composition, the nucleic acid encoding the base editor is an mRNA.

[0042] Compositions and articles defined by the invention were isolated or otherwise manufactured in connection with the examples provided below. Other features and advantages of the invention will be apparent from the detailed description, and from the claims.

### Definitions

[0043] The following definitions supplement those in the art and are directed to the current application and are not to be imputed to any related or unrelated case, e.g., to any commonly owned patent or application. Although any methods and materials similar or equivalent to those described herein can be used in the practice for testing of the present disclosure, the preferred materials and methods are described herein. Accordingly, the terminology used herein is for the purpose of describing particular embodiments only, and is not intended to be limiting.

[0044] Unless defined otherwise, all technical and scientific terms used herein have the meaning commonly understood by a person skilled in the art to which this invention belongs. The following references provide one of skill with a general definition of many of the terms used in this invention: Singleton et al., Dictionary of Microbiology and Molecular Biology (2nd ed. 1994); The Cambridge Dictionary of Science and Technology (Walker ed., 1988); The Glossary of Genetics, 5th Ed., R. Rieger et al. (eds.), Springer Verlag (1991); and Hale & Marham, The Harper Collins Dictionary of Biology (1991). As used herein, the following terms have the meanings ascribed to them below, unless specified otherwise.

[0045] In this application, the use of the singular includes the plural unless specifically stated otherwise. It must be noted that, as used in the specification, the singular forms “a,” “an” and “the” include plural referents unless the context clearly dictates otherwise. In this application, the use of “or” means “and/or” unless stated otherwise. Furthermore, use of the term “including” as well as other forms, such as “include”, “includes,” and “included,” is not limiting.

[0046] As used in this specification and claim(s), the words “comprising” (and any form of comprising, such as “comprise” and “comprises”), “having” (and any form of having, such as “have” and “has”), “including” (and any form of including, such as “includes” and “include”) or “containing” (and any form of containing, such as “contains” and “contain”) are inclusive or open-ended and do not exclude additional, unrecited elements or method steps. It is contemplated that any embodiment discussed in this specification can be implemented with respect to any method or composition of the present disclosure, and vice versa. Furthermore, compositions of the present disclosure can be used to achieve methods of the present disclosure.

[0047] The term “about” or “approximately” means within an acceptable error range for the particular value as determined by one of ordinary skill in the art, which will depend in part on how the value is measured or determined, i.e., the limitations of the measurement system. For example, “about” can mean within 1 or more than 1 standard deviation, per the practice in the art. Alternatively, “about” can mean a range of up to 20%, up to 10%, up to 5%, or up to 1% of a given value. Alternatively, particularly with respect to biological systems or processes, the term can mean within an order of magnitude, e.g., within 5-fold, within 2-fold of a value. Where particular values are described in the application and claims, unless otherwise stated, the term “about” means within an acceptable error range for the particular value should be assumed.

[0048] Reference in the specification to “some embodiments,” “an embodiment,” “one embodiment” or “other embodiments” means that a particular feature, structure, or characteristic described in connection with the embodiments is included in at least some embodiments, but not necessarily all embodiments, of the present disclosures.

[0049] By “adenosine deaminase” is meant a polypeptide or fragment thereof capable of catalyzing the hydrolytic deamination of adenine or adenosine. In some embodiments, the deaminase or deaminase domain is an adenosine deaminase catalyzing the hydrolytic deamination of adenosine to inosine or deoxy adenosine to deoxyinosine. In some embodiments, the adenosine deaminase catalyzes the hydrolytic deamination of adenine or adenosine in deoxyribonucleic acid (DNA). The adenosine deaminases (e.g., engineered adenosine deaminases, evolved adenosine deaminases) provided herein may be from any organism, such as a bacterium.

[0050] In some embodiments, the deaminase or deaminase domain is a variant of a naturally-occurring deaminase from an organism, such as a human, chimpanzee, gorilla, monkey, cow, dog, rat, or mouse. In some embodiments, the deaminase or deaminase domain does not occur in nature. For example, in some embodiments, the deaminase or deaminase domain is at least 50%, at least 55%, at least 60%, at least 65%, at least 70%, at least 75% at least 80%, at least 85%, at least 90%, at least 95%, at least 96%, at least 97%, at least 98%, at least 99%, or at least 99.5% identical to a naturally-occurring deaminase. In some embodiments, the adenosine deaminase is from a bacterium, such as, E. coli, S. aureus, S. typhi, S. putrefaciens, H. influenzae, or C. crescentus. In some embodiments, the adenosine deaminase is a TadA deaminase. In some embodiments, the TadA deaminase is an E. coli TadA (ecTadA) deaminase or a fragment thereof.

[0051] For example, deaminase domains are described in International PCT Application Nos. PCT/2017/045381 (WO 2018/027078) and PCT/US2016/058344 (WO 2017/070632), each of which is incorporated herein by reference for its entirety. Also, see Komor, A. C., et al., “Programmable editing of a target base in genomic DNA without double-stranded DNA cleavage” Nature 533, 420-424 (2016); Gaudelli, N. M., et al., “Programmable base editing of A·T to G·C in genomic DNA without DNA cleavage” Nature 551, 464-471 (2017); Komor, A. C., et al., “Improved base excision repair inhibition and bacteriophage Mu Gam protein yields C:G-to-T:A base editors with higher efficiency and product purity” Science Advances 3:eaao4774 (2017)), and Rees, H. A., et al., “Base editing: precision chemistry on the genome and transcriptome of living cells.” Nat Rev Genet. 2018 December; 19(12):770-788. doi: 10.1038/s41576-018-0059-1, the entire contents of which are hereby incorporated by reference.

[0052] A wild type TadA(wt) adenosine deaminase has the following sequence (also termed TadA reference sequence):

MSEVEFSHEYWMRHALTLAKRAWDEREVPVGAVLVHNNRVIGEGWNRPIG
RHDPTAHAEIMALRQGGLVMQNYRLIDATLYVTLEPCVMCAGAMIHSRIG
RVVFGARDAKTGAAGSLMDVLHHPGMNHRVEITEGILADECAALLSDFFR
MRRQEIKAQKKAQSSTD.

[0053] In some embodiments, the adenosine deaminase comprises an alteration in the following sequence:

MSEVEFSHEYWMRHALTLAKRARDEREVPVGAVLVLNNRVIGEGWNRAIG
LHDPTAHAEIMALRQGGLVMQNYRLIDATLYVTFEPCVMCAGAMIHSRIG
RVVFGVRNAKTGAAGSLMDVLHYPGMNHRVEITEGILADECAALLCYFFR
MPRQVFNAQKKAQSSTD (also termed TadA*7.10).

[0054] In some embodiments, TadA*7.10 comprises at least one alteration. In some embodiments, TadA*7.10 comprises an alteration at amino acid 82 and/or 166. In particular embodiments, a variant of the above-referenced sequence comprises one or more of the following alterations: Y147T, Y147R, Q154S, Y123H, V82S, T166R, and/or Q154R. The alteration Y123H refers to the alteration H123Y in TadA*7.10 reverted back to Y123H TadA(wt). In other embodiments, a variant of the TadA*7.10 sequence comprises a combination of alterations selected from the group of: Y147T+Q154R; Y147T+Q154S; Y147R+Q154S; V82S+Q154S; V82S+Y147R; V82S+Q154R; V82S+Y123H; I76Y+V82S; V82S+Y123H+Y147T; V82S+Y123H+Y147R; V82S+Y123H+Q154R; Y147R+Q154R+Y123H; Y147R+Q154R+176Y; Y147R+Q154R+T166R; Y123H+Y147R+Q154R+I76Y; V82S+Y123H+Y147R+Q154R; and I76Y+V82S+Y123H+Y147R+Q154R.

[0055] In other embodiments, the invention provides adenosine deaminase variants that include deletions, e.g., TadA*8, comprising a deletion of the C-terminus beginning at residue 149, 150, 151, 152, 153, 154, 155, 156, or 157, relative to TadA*7.10, the TadA reference sequence, or a corresponding mutation in another TadA. In other embodiments, the adenosine deaminase variant is a TadA (e.g., TadA*8) monomer comprising one or more of the following alterations: Y147T, Y147R, Q154S, Y123H, V82S, T166R, and/or Q154R, relative to TadA*7.10, the TadA reference sequence, or a corresponding mutation in another TadA. In other embodiments, the adenosine deaminase variant is a TadA (e.g., TadA*8) monomer comprising the following alterations: Y147T+Q154R; Y147T+Q154S; Y147R+Q154S; V82S+Q154S; V82S+Y147R; V82S+Q154R; V82S+Y123H; I76Y+V82S; V82S+Y123H+Y147T; V82S+Y123H+Y147R; V82S+Y123H+Q154R; Y147R+Q154R+Y123H; Y147R+Q154R+I76Y; Y147R+Q154R+T166R; Y123H+Y147R+Q154R+I76Y; V82S+Y123H+Y147R+Q154R; and I76Y+V82S+Y123H+Y147R+Q154R, relative to TadA*7.10, the TadA reference sequence, or a corresponding mutation in another TadA.

[0056] In still other embodiments, the adenosine deaminase variant is a homodimer comprising two adenosine deaminase domains each having one or more of the following alterations Y147T, Y147R, Q154S, Y123H, V82S, T166R, and/or Q154R relative to TadA*7.10, the TadA reference sequence, or a corresponding mutation in another TadA. In other embodiments, the adenosine deaminase variant is a homodimer comprising two adenosine deaminase domains (e.g., TadA*8) each having a combination of alterations selected from the group of: Y147T+Q154R; Y147T+Q154S; Y147R+Q154S; V82S+Q154S; V82S+Y147R; V82S+Q154R; V82S+Y123H; I76Y+V82S; V82S+Y123H+Y147T; V82S+Y123H+Y147R; V82S+Y123H+Q154R; Y147R+Q154R+Y123H; Y147R+Q154R+I76Y; Y147R+Q154R+T166R; Y123H+Y147R+Q154R+I76Y; V82S+Y123H+Y147R+Q154R; and I76Y+V82S+Y123H+Y147R+Q154R, relative to TadA*7.10, the TadA reference sequence, or a corresponding mutation in another TadA. In other embodiments, the adenosine deaminase variant is a heterodimer comprising a wild-type TadA adenosine deaminase domain and an adenosine deaminase variant domain (e.g., TadA*8) comprising one or more of the following alterations Y147T, Y147R, Q154S, Y123H, V82S, T166R, and/or Q154R, relative to TadA*7.10, the TadA reference sequence, or a corresponding mutation in another TadA. In other embodiments, the adenosine deaminase variant is a heterodimer comprising a wild-type TadA adenosine deaminase domain and an adenosine deaminase variant domain (e.g. TadA*8) comprising a combination of alterations selected from the group of: Y147T+Q154R; Y147T+Q154S; Y147R+Q154S; V82S+Q154S; V82S+Y147R; V82S+Q154R; V82S+Y123H; I76Y+V82S; V82S+Y123H+Y147T; V82S+Y123H+Y147R; V82S+Y123H+Q154R; Y147R+Q154R+Y123H; Y147R+Q154R+176Y; Y147R+Q154R+T166R; Y123H+Y147R+Q154R+I76Y; V82S+Y123H+Y147R+Q154R; and I76Y+V82S+Y123H+Y147R+Q154R, relative to TadA*7.10, the TadA reference sequence, or a corresponding mutation in another TadA.

[0057] In other embodiments, the adenosine deaminase variant is a heterodimer comprising a TadA*7.10 domain and an adenosine deaminase variant domain (e.g., TadA*8) comprising one or more of the following alterations Y147T, Y147R, Q154S, Y123H, V82S, T166R, and/or Q154R, relative to TadA*7.10, the TadA reference sequence, or a corresponding mutation in another TadA. In other embodiments, the adenosine deaminase variant is a heterodimer comprising a TadA*7.10 domain and an adenosine deaminase variant domain (e.g. TadA*8) comprising a combination of the following alterations: Y147T+Q154R; Y147T+Q154S; Y147R+Q154S; V82S+Q154S; V82S+Y147R; V82S+Q154R; V82S+Y123H; I76Y+V82S; V82S+Y123H+Y147T; V82S+Y123H+Y147R; V82S+Y123H+Q154R; Y147R+Q154R+Y123H; Y147R+Q154R+I76Y; Y147R+Q154R+T166R; Y123H+Y147R+Q154R+I76Y; V82S+Y123H+Y147R+Q154R; or I76Y+V82S+Y123H+Y147R+Q154R, relative to TadA*7.10, the TadA reference sequence, or a corresponding mutation in another TadA. In one embodiment, the adenosine deaminase is a TadA*8 that comprises or consists essentially of the following sequence or a fragment thereof having adenosine deaminase activity:

MSEVEFSHEYWMRHALTLAKRARDEREVPVGAVLVLNNRVIGEGWNRAIG
LHDPTAHAEIMALRQGGLVMQNYRLIDATLYVTFEPCVMCAGAMIHSRIG
RVVFGVRNAKTGAAGSLMDVLHYPGMNHRVEITEGILADECAALLCTFFR
MPRQVFNAQKKAQSSID.

In some embodiments, the TadA*8 is truncated. In some embodiments, the truncated TadA*8 is missing 1, 2, 3, 4, 5, 6, 7, 8, 9, 10, 11, 12, 13, 14, 15, 6, 17, 18, 19, or 20 N-terminal amino acid residues relative to the full length TadA*8. In some embodiments, the truncated TadA*8 is missing 1, 2, 3, 4, 5, 6, 7, 8, 9, 10, 11, 12, 13, 14, 15, 6, 17, 18, 19, or 20 C-terminal amino acid residues relative to the full length TadA*8. In some embodiments the adenosine deaminase variant is a full-length TadA*8. In particular embodiments, an adenosine deaminase heterodimer comprises a TadA*8 domain and an adenosine deaminase domain selected from one of the following:

Staphylococcus aureus (S. aureus) TadA:
MGSHMTNDIYFMTLAIEEAKKAAQLGEVPIGAIITKDDEVIARAHNLRET
LQQPTAHAEHIAIERAAKVLGSWRLEGCTLYVTLEPCVMCAGTIVMSRIP
RVVYGADDPKGGCSGSLMNLLQQSNFNHRAIVDKGVLKEACSTLLTTFFK
NLRANKKSTN
Bacillus subtilis (B. subtilis) TadA:
MTQDELYMKEAIKEAKKAEEKGEVPIGAVLVINGEIIARAHNLRETEQRS
IAHAEMLVIDEACKALGTWRLEGATLYVTLEPCPMCAGAVVLSRVEKVVF
GAFDPKGGCSGTLMNLLQEERFNHQAEVVSGVLEEECGGMLSAFFRELRK
KKKAARKNLSE
Salmonella typhimurium (S. typhimurium) TadA:
MPPAFITGVTSLSDVELDHEYWMRHALTLAKRAWDEREVPVGAVLVHNHR
VIGEGWNRPIGRHDPTAHAEIMALRQGGLVLQNYRLLDTTLYVTLEPCVM
CAGAMVHSRIGRVVFGARDAKTGAAGSLIDVLHHPGMNHRVEIIEGVLRD
ECATLLSDFFRMRRQEIKALKKADRAEGAGPAV
Shewanella putrefaciens (S. putrefaciens) TadA:
MDEYWMQVAMQMAEKAEAAGEVPVGAVLVKDGQQIATGYNLSISQHDPTA
HAEILCLRSAGKKLENYRLLDATLYITLEPCAMCAGAMVHSRIARVVYGA
RDEKTGAAGTVVNLLQHPAFNHQVEVTSGVLAEACSAQLSRFFKRRRDEK
KALKLAQRAQQGIE
Haemophilus influenzae F3031 (H. influenzae)
TadA:
MDAAKVRSEFDEKMMRYALELADKAEALGEIPVGAVLVDDARNIIGEGWN
LSIVQSDPTAHAEIIALRNGAKNIQNYRLLNSTLYVTLEPCTMCAGAILH
SRIKRLVFGASDYKTGAIGSRFHFFDDYKMNHTLEITSGVLAEECSQKLS
TFFQKRREEKKIEKALLKSLSDK
Caulobacter crescentus (C. crescentus) TadA:
MRTDESEDQDHRMMRLALDAARAAAEAGETPVGAVILDPSTGEVIATAGN
GPIAAHDPTAHAEIAAMRAAAAKLGNYRLTDLTLVVTLEPCAMCAGAISH
ARIGRVVFGADDPKGGAVVHGPKFFAQPTCHWRPEVTGGVLADESADLLR
GFFRARRKAKI
Geobacter sulfurreducens (G. sulfurreducens) TadA:
MSSLKKTPIRDDAYWMGKAIREAAKAAARDEVPIGAVIVRDGAVIGRGHN
LREGSNDPSAHAEMIAIRQAARRSANWRLTGATLYVTLEPCLMCMGAIIL
ARLERVVFGCYDPKGGAAGSLYDLSADPRLNHQVRLSPGVCQEECGTMLS
DFFRDLRRRKKAKATPALFIDERKVPPEP
TadA*7.10
MSEVEFSHEYWMRHALTLAKRARDEREVPVGAVLVLNNRVIGEGWNRAIG
LHDPTAHAEIMALRQGGLVMQNYRLIDATLYVTFEPCVMCAGAMIHSRIG
RVVFGVRNAKTGAAGSLMDVLHYPGMNHRVEITEGILADECAALLCYFFR
MPRQVFNAQKKAQSSTD.

[0058] By “Adenosine Deaminase Base Editor 8 (ABE8) polypeptide” or “ABE8” is meant a base editor as defined herein comprising an adenosine deaminase variant comprising an alteration at amino acid position 82 and/or 166 of the following reference sequence:

MSEVEFSHEYWMRHALTLAKRARDEREVPVGAVLVLNNRVIGEGWNRAIG
LHDPTAHAEIMALRQGGLVMQNYRLIDATLYVTFEPCVMCAGAMIHSRIG
RVVFGVRNAKTGAAGSLMDVLHYPGMNHRVEITEGILADECAALLCYFFR
MPRQVFNAQKKAQSSTD

[0059] In some embodiments, ABE8 comprises further alterations, as described herein, relative to the reference sequence.

[0060] By “Adenosine Deaminase Base Editor 8 (ABE8) polynucleotide” is meant a polynucleotide encoding an ABE8.

[0061] “Administering” is referred to herein as providing one or more compositions described herein to a patient or a subject. By way of example and without limitation, composition administration, e.g., injection, can be performed by intravenous (i.v.) injection, sub-cutaneous (s.c.) injection, intradermal (i.d.) injection, intraperitoneal (i.p.) injection, or intramuscular (i.m.) injection. One or more such routes can be employed. Parenteral administration can be, for example, by bolus injection or by gradual perfusion over time. Alternatively, or concurrently, administration can be by an oral route.

[0062] By “agent” is meant any small molecule chemical compound, antibody, nucleic acid molecule, or polypeptide, or fragments thereof.

[0063] By “alteration” is meant a change (increase or decrease) in the expression levels or activity of a gene or polypeptide as detected by standard art known methods such as those described herein. As used herein, an alteration includes a 10% change in expression levels, a 25% change, a 40% change, and a 50% or greater change in expression levels.

[0064] By “ameliorate” is meant decrease, suppress, attenuate, diminish, arrest, or stabilize the development or progression of a disease.

[0065] By “analog” is meant a molecule that is not identical, but has analogous functional or structural features. For example, a polypeptide analog retains the biological activity of a corresponding naturally-occurring polypeptide, while having certain biochemical modifications that enhance the analog's function relative to a naturally occurring polypeptide. Such biochemical modifications could increase the analog's protease resistance, membrane permeability, or half-life, without altering, for example, ligand binding. An analog may include an unnatural amino acid.

[0066] By “base editor (BE),” or “nucleobase editor (NBE)” is meant an agent that binds a polynucleotide and has nucleobase modifying activity. In various embodiments, the base editor comprises a nucleobase modifying polypeptide (e.g., a deaminase) and a polynucleotide programmable nucleotide binding domain in conjunction with a guide polynucleotide (e.g., guide RNA). In various embodiments, the agent is a biomolecular complex comprising a protein domain having base editing activity, i.e., a domain capable of modifying a base (e.g., A, T, C, G, or U) within a nucleic acid molecule (e.g., DNA). In some embodiments, the polynucleotide programmable DNA binding domain is fused or linked to a deaminase domain. In one embodiment, the agent is a fusion protein comprising one or more domains having base editing activity. In another embodiment, the protein domains having base editing activity are linked to the guide RNA (e.g., via an RNA binding motif on the guide RNA and an RNA binding domain fused to the deaminase). In some embodiments, the domains having base editing activity are capable of deaminating a base within a nucleic acid molecule. In some embodiments, the base editor is capable of deaminating one or more bases within a DNA molecule. In some embodiments, the base editor is capable of deaminating a cytosine (C) or an adenosine (A) within DNA. In some embodiments, the base editor is capable of deaminating a cytosine (C) and an adenosine (A) within DNA. In some embodiments, the base editor is a cytidine base editor (CBE). In some embodiments, the base editor is an adenosine base editor (ABE). In some embodiments, the base editor is an adenosine base editor (ABE) and a cytidine base editor (CBE). In some embodiments, the base editor is a nuclease-inactive Cas9 (dCas9) fused to an adenosine deaminase. In some embodiments, the Cas9 is a circular permutant Cas9 (e.g., spCas9 or saCas9). Circular permutant Cas9s are known in the art and described, for example, in Oakes et al., Cell 176, 254-267, 2019. In some embodiments, the base editor is fused to an inhibitor of base excision repair, for example, a UGI domain, or a dISN domain. In some embodiments, the fusion protein comprises a Cas9 nickase fused to a deaminase and an inhibitor of base excision repair, such as a UGI or dISN domain. In other embodiments the base editor is an abasic base editor.

[0067] In some embodiments, an adenosine deaminase is evolved from TadA. In some embodiments, the polynucleotide programmable DNA binding domain is a CRISPR associated (e.g., Cas or Cpf1) enzyme. In some embodiments, the base editor is a catalytically dead Cas9 (dCas9) fused to a deaminase domain. In some embodiments, the base editor is a Cas9 nickase (nCas9) fused to a deaminase domain. In some embodiments, the base editor is fused to an inhibitor of base excision repair (BER). In some embodiments, the inhibitor of base excision repair is a uracil DNA glycosylase inhibitor (UGI). In some embodiments, the inhibitor of base excision repair is an inosine base excision repair inhibitor. Details of base editors are described in International PCT Application Nos. PCT/2017/045381 (WO2018/027078) and PCT/US2016/058344 (WO2017/070632), each of which is incorporated herein by reference for its entirety. Also see Komor, A. C., et al., “Programmable editing of a target base in genomic DNA without double-stranded DNA cleavage” Nature 533, 420-424 (2016); Gaudelli, N. M., et al., “Programmable base editing of A·T to G·C in genomic DNA without DNA cleavage” Nature 551, 464-471 (2017); Komor, A. C., et al., “Improved base excision repair inhibition and bacteriophage Mu Gam protein yields C:G-to-T:A base editors with higher efficiency and product purity” Science Advances 3:eaao4774 (2017), and Rees, H. A., et al., “Base editing: precision chemistry on the genome and transcriptome of living cells.” Nat Rev Genet. 2018 December; 19(12):770-788. doi: 10.1038/s41576-018-0059-1, the entire contents of which are hereby incorporated by reference.

[0068] In some embodiments, base editors are generated (e.g., ABE8) by cloning an adenosine deaminase variant (e.g., TadA*8) into a scaffold that includes a circular permutant Cas9 (e.g., spCAS9) and a bipartite nuclear localization sequence. Circular permutant Cas9s are known in the art and described, for example, in Oakes et al., Cell 176, 254-267, 2019. Exemplary circular permutant sequences are set forth below, in which the bold sequence indicates sequence derived from Cas9, the italics sequence denotes a linker sequence, and the underlined sequence denotes a bipartite nuclear localization sequence.

CP5 (with MSP “NGC=Pam Variant with mutations Regular Cas9 likes NGG” PID=Protein Interacting Domain and “D10A” nickase):

EIGKATAKYFFYSNIMNFFKTEITLANGEIRKRPLIETNGETGEIVWDKG
RDFATVRKVLSMPQVNIVKKTEVQTGGFSKESILPKRNSDKLIARKKDWD
PKKYGGFMQPTVAYSVLVVAKVEKGKSKKLKSVKELLGITIMERSSFEKN
PIDFLEAKGYKEVKKDLIIKLPKYSLFELENGRKRMLASAKFLQKGNELA
LPSKYVNFLYLASHYEKLKGSPEDNEQKQLFVEQHKHYLDEIIEQISEFS
KRVILADANLDKVLSAYNKHRDKPIREQAENIIHLFTLTNLGAPRAFKYF
DTTIARKEYRSTKEVLDATLIHQSITGLYETRIDLSQLGGDGGSGGSGGS
GGSGGSGGSGGMDKKYSIGLAIGTNSVGWAVITDEYKVPSKKFKVLGNTD
RHSIKKNLIGALLFDSGETAEATRLKRTARRRYTRRKNRICYLQEIFSNE
MAKVDDSFFHRLEESFLVEEDKKHERHPIFGNIVDEVAYHEKYPTIYHLR
KKLVDSTDKADLRLIYLALAHMIKFRGHFLIEGDLNPDNSDVDKLFIQLV
QTYNQLFEENPINASGVDAKAILSARLSKSRRLENLIAQLPGEKKNGLFG
NLIALSLGLTPNFKSNFDLAEDAKLQLSKDTYDDDLDNLLAQIGDQYADL
FLAAKNLSDAILLSDILRVNTEITKAPLSASMIKRYDEHHQDLTLLKALV
RQQLPEKYKEIFFDQSKNGYAGYIDGGASQEEFYKFIKPILEKMDGTEEL
LVKLNREDLLRKQRTFDNGSIPHQIHLGELHAILRRQEDFYPFLKDNREK
IEKILTFRIPYYVGPLARGNSRFAWMTRKSEETITPWNFEEVVDKGASAQ
SFIERMTNFDKNLPNEKVLPKHSLLYEYFTVYNELTKVKYVTEGMRKPAF
LSGEQKKAIVDLLFKTNRKVTVKQLKEDYFKKIECFDSVEISGVEDRFNA
SLGTYHDLLKIIKDKDFLDNEENEDILEDIVLTLTLFEDREMIEERLKTY
AHLFDDKVMKQLKRRRYTGWGRLSRKLINGIRDKQSGKTILDFLKSDGFA
NRNFMQLIHDDSLTFKEDIQKAQVSGQGDSLHEHIANLAGSPAIKKGILQ
TVKVVDELVKVMGRHKPENIVIEMARENQTTQKGQKNSRERMKRIEEGIK
ELGSQILKEHPVENTQLQNEKLYLYYLQNGRDMYVDQELDINRLSDYDVD
HIVPQSFLKDDSIDNKVLTRSDKNRGKSDNVPSEEVVKKMKNYWRQLLNA
KLITQRKFDNLTKAERGGLSELDKAGFIKRQLVETRQITKHVAQILDSRM
NTKYDENDKLIREVKVITLKSKLVSDFRKDFQFYKVREINNYHHAHDAYL
NAVVGTALIKKYPKLESEFVYGDYKVYDVRKMIAKSEQEGADKRTADGSE
FESPKKKRKV*

[0069] In some embodiments, the ABE8 is selected from a base editor from Table 8 infra. In some embodiments, ABE8 contains an adenosine deaminase variant evolved from TadA. In some embodiments, the adenosine deaminase variant of ABE8 is a TadA*8 variant as described in Table 8 infra. In some embodiments, the adenosine deaminase variant is the TadA*7.10 variant (e.g., TadA*8) comprising one or more of an alteration selected from the group consisting of Y147T, Y147R, Q154S, Y123H, V82S, T166R, and/or Q154R. In various embodiments, ABE8 comprises TadA*7.10 variant (e.g. TadA*8) with a combination of alterations selected from the group of Y147T+Q154R; Y147T+Q154S; Y147R+Q154S; V82S+Q154S; V82S+Y147R; V82S+Q154R; V82S+Y123H; I76Y+V82S; V82S+Y123H+Y147T; V82S+Y123H+Y147R; V82S+Y123H+Q154R; Y147R+Q154R+Y123H; Y147R+Q154R+176Y; Y147R+Q154R+T166R; Y123H+Y147R+Q154R+I76Y; V82S+Y123H+Y147R+Q154R; and I76Y+V82S+Y123H+Y147R+Q154R.

[0070] In some embodiments ABE8 is a monomeric construct. In some embodiments, ABE8 is a heterodimeric construct. In some embodiments the ABE8 base editor comprises the sequence:

MSEVEFSHEYWMRHALTLAKRARDEREVPVGAVLVLNNRVIGEGWNRAIG
LHDPTAHAEIMALRQGGLVMQNYRLIDATLYVTFEPCVMCAGAMIHSRIG
RVVFGVRNAKTGAAGSLMDVLHYPGMNHRVEITEGILADECAALLCTFFR
MPRQVFNAQKKAQSSTD

[0071] By way of example, the adenine base editor ABE to be used in the base editing compositions, systems and methods described herein has the nucleic acid sequence (8877 base pairs), (Addgene, Watertown, Mass.; Gaudelli N M, et al., Nature. 2017 November 23; 551(7681):464-471. doi: 10.1038/nature24644; Koblan L W, et al., Nat Biotechnol. 2018 October; 36(9):843-846. doi: 10.1038/nbt. 4172.) as provided below. Polynucleotide sequences having at least 95% or greater identity to the ABE nucleic acid sequence are also encompassed.

ATATGCCAAGTACGCCCCCTATTGACGTCAATGACGGTAAATGGCCCGCCTGGCATTATGCCCAGTACAT
GACCTTATGGGACTTTCCTACTTGGCAGTACATCTACGTATTAGTCATCGCTATTACCATGGTGATGCGG
TTTTGGCAGTACATCAATGGGCGTGGATAGCGGTTTGACTCACGGGGATTTCCAAGTCTCCACCCCATTG
ACGTCAATGGGAGTTTGTTTTGGCACCAAAATCAACGGGACTTTCCAAAATGTCGTAACAACTCCGCCCC
ATTGACGCAAATGGGCGGTAGGCGTGTACGGTGGGAGGTCTATATAAGCAGAGCTGGTTTAGTGAACCGT
CAGATCCGCTAGAGATCCGCGGCCGCTAATACGACTCACTATAGGGAGAGCCGCCACCATGAAACGGACA
GCCGACGGAAGCGAGTTCGAGTCACCAAAGAAGAAGCGGAAAGTCTCTGAAGTCGAGTTTAGCCACGAGT
ATTGGATGAGGCACGCACTGACCCTGGCAAAGCGAGCATGGGATGAAAGAGAAGTCCCCGTGGGCGCCGT
GCTGGTGCACAACAATAGAGTGATCGGAGAGGGATGGAACAGGCCAATCGGCCGCCACGACCCTACCGCA
CACGCAGAGATCATGGCACTGAGGCAGGGAGGCCTGGTCATGCAGAATTACCGCCTGATCGATGCCACCC
TGTATGTGACACTGGAGCCATGCGTGATGTGCGCAGGAGCAATGATCCACAGCAGGATCGGAAGAGTGGT
GTTCGGAGCACGGGACGCCAAGACCGGCGCAGCAGGCTCCCTGATGGATGTGCTGCACCACCCCGGCATG
AACCACCGGGTGGAGATCACAGAGGGAATCCTGGCAGACGAGTGCGCCGCCCTGCTGAGCGATTTCTTTA
GAATGCGGAGACAGGAGATCAAGGCCCAGAAGAAGGCACAGAGCTCCACCGACTCTGGAGGATCTAGCGG
AGGATCCTCTGGAAGCGAGACACCAGGCACAAGCGAGTCCGCCACACCAGAGAGCTCCGGCGGCTCCTCC
GGAGGATCCTCTGAGGTGGAGTTTTCCCACGAGTACTGGATGAGACATGCCCTGACCCTGGCCAAGAGGG
CACGCGATGAGAGGGAGGTGCCTGTGGGAGCCGTGCTGGTGCTGAACAATAGAGTGATCGGCGAGGGCTG
GAACAGAGCCATCGGCCTGCACGACCCAACAGCCCATGCCGAAATTATGGCCCTGAGACAGGGCGGCCTG
GTCATGCAGAACTACAGACTGATTGACGCCACCCTGTACGTGACATTCGAGCCTTGCGTGATGTGCGCCG
GCGCCATGATCCACTCTAGGATCGGCCGCGTGGTGTTTGGCGTGAGGAACGCAAAAACCGGCGCCGCAGG
CTCCCTGATGGACGTGCTGCACTACCCCGGCATGAATCACCGCGTCGAAATTACCGAGGGAATCCTGGCA
GATGAATGTGCCGCCCTGCTGTGCTATTTCTTTCGGATGCCTAGACAGGTGTTCAATGCTCAGAAGAAGG
CCCAGAGCTCCACCGACTCCGGAGGATCTAGCGGAGGCTCCTCTGGCTCTGAGACACCTGGCACAAGCGA
GAGCGCAACACCTGAAAGCAGCGGGGGCAGCAGCGGGGGGTCAGACAAGAAGTACAGCATCGGCCTGGCC
ATCGGCACCAACTCTGTGGGCTGGGCCGTGATCACCGACGAGTACAAGGTGCCCAGCAAGAAATTCAAGG
TGCTGGGCAACACCGACCGGCACAGCATCAAGAAGAACCTGATCGGAGCCCTGCTGTTCGACAGCGGCGA
AACAGCCGAGGCCACCCGGCTGAAGAGAACCGCCAGAAGAAGATACACCAGACGGAAGAACCGGATCTGC
TATCTGCAAGAGATCTTCAGCAACGAGATGGCCAAGGTGGACGACAGCTTCTTCCACAGACTGGAAGAGT
CCTTCCTGGTGGAAGAGGATAAGAAGCACGAGCGGCACCCCATCTTCGGCAACATCGTGGACGAGGTGGC
CTACCACGAGAAGTACCCCACCATCTACCACCTGAGAAAGAAACTGGTGGACAGCACCGACAAGGCCGAC
CTGCGGCTGATCTATCTGGCCCTGGCCCACATGATCAAGTTCCGGGGCCACTTCCTGATCGAGGGCGACC
TGAACCCCGACAACAGCGACGTGGACAAGCTGTTCATCCAGCTGGTGCAGACCTACAACCAGCTGTTCGA
GGAAAACCCCATCAACGCCAGCGGCGTGGACGCCAAGGCCATCCTGTCTGCCAGACTGAGCAAGAGCAGA
CGGCTGGAAAATCTGATCGCCCAGCTGCCCGGCGAGAAGAAGAATGGCCTGTTCGGAAACCTGATTGCCC
TGAGCCTGGGCCTGACCCCCAACTTCAAGAGCAACTTCGACCTGGCCGAGGATGCCAAACTGCAGCTGAG
CAAGGACACCTACGACGACGACCTGGACAACCTGCTGGCCCAGATCGGCGACCAGTACGCCGACCTGTTT
CTGGCCGCCAAGAACCTGTCCGACGCCATCCTGCTGAGCGACATCCTGAGAGTGAACACCGAGATCACCA
AGGCCCCCCTGAGCGCCTCTATGATCAAGAGATACGACGAGCACCACCAGGACCTGACCCTGCTGAAAGC
TCTCGTGCGGCAGCAGCTGCCTGAGAAGTACAAAGAGATTTTCTTCGACCAGAGCAAGAACGGCTACGCC
GGCTACATTGACGGCGGAGCCAGCCAGGAAGAGTTCTACAAGTTCATCAAGCCCATCCTGGAAAAGATGG
ACGGCACCGAGGAACTGCTCGTGAAGCTGAACAGAGAGGACCTGCTGCGGAAGCAGCGGACCTTCGACAA
CGGCAGCATCCCCCACCAGATCCACCTGGGAGAGCTGCACGCCATTCTGCGGCGGCAGGAAGATTTTTAC
CCATTCCTGAAGGACAACCGGGAAAAGATCGAGAAGATCCTGACCTTCCGCATCCCCTACTACGTGGGCC
CTCTGGCCAGGGGAAACAGCAGATTCGCCTGGATGACCAGAAAGAGCGAGGAAACCATCACCCCCTGGAA
CTTCGAGGAAGTGGTGGACAAGGGCGCTTCCGCCCAGAGCTTCATCGAGCGGATGACCAACTTCGATAAG
AACCTGCCCAACGAGAAGGTGCTGCCCAAGCACAGCCTGCTGTACGAGTACTTCACCGTGTATAACGAGC
TGACCAAAGTGAAATACGTGACCGAGGGAATGAGAAAGCCCGCCTTCCTGAGCGGCGAGCAGAAAAAGGC
CATCGTGGACCTGCTGTTCAAGACCAACCGGAAAGTGACCGTGAAGCAGCTGAAAGAGGACTACTTCAAG
AAAATCGAGTGCTTCGACTCCGTGGAAATCTCCGGCGTGGAAGATCGGTTCAACGCCTCCCTGGGCACAT
ACCACGATCTGCTGAAAATTATCAAGGACAAGGACTTCCTGGACAATGAGGAAAACGAGGACATTCTGGA
AGATATCGTGCTGACCCTGACACTGTTTGAGGACAGAGAGATGATCGAGGAACGGCTGAAAACCTATGCC
CACCTGTTCGACGACAAAGTGATGAAGCAGCTGAAGCGGCGGAGATACACCGGCTGGGGCAGGCTGAGCC
GGAAGCTGATCAACGGCATCCGGGACAAGCAGTCCGGCAAGACAATCCTGGATTTCCTGAAGTCCGACGG
CTTCGCCAACAGAAACTTCATGCAGCTGATCCACGACGACAGCCTGACCTTTAAAGAGGACATCCAGAAA
GCCCAGGTGTCCGGCCAGGGCGATAGCCTGCACGAGCACATTGCCAATCTGGCCGGCAGCCCCGCCATTA
AGAAGGGCATCCTGCAGACAGTGAAGGTGGTGGACGAGCTCGTGAAAGTGATGGGCCGGCACAAGCCCGA
GAACATCGTGATCGAAATGGCCAGAGAGAACCAGACCACCCAGAAGGGACAGAAGAACAGCCGCGAGAGA
ATGAAGCGGATCGAAGAGGGCATCAAAGAGCTGGGCAGCCAGATCCTGAAAGAACACCCCGTGGAAAACA
CCCAGCTGCAGAACGAGAAGCTGTACCTGTACTACCTGCAGAATGGGCGGGATATGTACGTGGACCAGGA
ACTGGACATCAACCGGCTGTCCGACTACGATGTGGACCATATCGTGCCTCAGAGCTTTCTGAAGGACGAC
TCCATCGACAACAAGGTGCTGACCAGAAGCGACAAGAACCGGGGCAAGAGCGACAACGTGCCCTCCGAAG
AGGTCGTGAAGAAGATGAAGAACTACTGGCGGCAGCTGCTGAACGCCAAGCTGATTACCCAGAGAAAGTT
CGACAATCTGACCAAGGCCGAGAGAGGCGGCCTGAGCGAACTGGATAAGGCCGGCTTCATCAAGAGACAG
CTGGTGGAAACCCGGCAGATCACAAAGCACGTGGCACAGATCCTGGACTCCCGGATGAACACTAAGTACG
ACGAGAATGACAAGCTGATCCGGGAAGTGAAAGTGATCACCCTGAAGTCCAAGCTGGTGTCCGATTTCCG
GAAGGATTTCCAGTTTTACAAAGTGCGCGAGATCAACAACTACCACCACGCCCACGACGCCTACCTGAAC
GCCGTCGTGGGAACCGCCCTGATCAAAAAGTACCCTAAGCTGGAAAGCGAGTTCGTGTACGGCGACTACA
AGGTGTACGACGTGCGGAAGATGATCGCCAAGAGCGAGCAGGAAATCGGCAAGGCTACCGCCAAGTACTT
CTTCTACAGCAACATCATGAACTTTTTCAAGACCGAGATTACCCTGGCCAACGGCGAGATCCGGAAGCGG
CCTCTGATCGAGACAAACGGCGAAACCGGGGAGATCGTGTGGGATAAGGGCCGGGATTTTGCCACCGTGC
GGAAAGTGCTGAGCATGCCCCAAGTGAATATCGTGAAAAAGACCGAGGTGCAGACAGGCGGCTTCAGCAA
AGAGTCTATCCTGCCCAAGAGGAACAGCGATAAGCTGATCGCCAGAAAGAAGGACTGGGACCCTAAGAAG
TACGGCGGCTTCGACAGCCCCACCGTGGCCTATTCTGTGCTGGTGGTGGCCAAAGTGGAAAAGGGCAAGT
CCAAGAAACTGAAGAGTGTGAAAGAGCTGCTGGGGATCACCATCATGGAAAGAAGCAGCTTCGAGAAGAA
TCCCATCGACTTTCTGGAAGCCAAGGGCTACAAAGAAGTGAAAAAGGACCTGATCATCAAGCTGCCTAAG
TACTCCCTGTTCGAGCTGGAAAACGGCCGGAAGAGAATGCTGGCCTCTGCCGGCGAACTGCAGAAGGGAA
ACGAACTGGCCCTGCCCTCCAAATATGTGAACTTCCTGTACCTGGCCAGCCACTATGAGAAGCTGAAGGG
CTCCCCCGAGGATAATGAGCAGAAACAGCTGTTTGTGGAACAGCACAAGCACTACCTGGACGAGATCATC
GAGCAGATCAGCGAGTTCTCCAAGAGAGTGATCCTGGCCGACGCTAATCTGGACAAAGTGCTGTCCGCCT
ACAACAAGCACCGGGATAAGCCCATCAGAGAGCAGGCCGAGAATATCATCCACCTGTTTACCCTGACCAA
TCTGGGAGCCCCTGCCGCCTTCAAGTACTTTGACACCACCATCGACCGGAAGAGGTACACCAGCACCAAA
GAGGTGCTGGACGCCACCCTGATCCACCAGAGCATCACCGGCCTGTACGAGACACGGATCGACCTGTCTC
AGCTGGGAGGTGACTCTGGCGGCTCAAAAAGAACCGCCGACGGCAGCGAATTCGAGCCCAAGAAGAAGAG
GAAAGTCTAACCGGTCATCATCACCATCACCATTGAGTTTAAACCCGCTGATCAGCCTCGACTGTGCCTT
CTAGTTGCCAGCCATCTGTTGTTTGCCCCTCCCCCGTGCCTTCCTTGACCCTGGAAGGTGCCACTCCCAC
TGTCCTTTCCTAATAAAATGAGGAAATTGCATCGCATTGTCTGAGTAGGTGTCATTCTATTCTGGGGGGT
GGGGTGGGGCAGGACAGCAAGGGGGAGGATTGGGAAGACAATAGCAGGCATGCTGGGGATGCGGTGGGCT
CTATGGCTTCTGAGGCGGAAAGAACCAGCTGGGGCTCGATACCGTCGACCTCTAGCTAGAGCTTGGCGTA
ATCATGGTCATAGCTGTTTCCTGTGTGAAATTGTTATCCGCTCACAATTCCACACAACATACGAGCCGGA
AGCATAAAGTGTAAAGCCTAGGGTGCCTAATGAGTGAGCTAACTCACATTAATTGCGTTGCGCTCACTGC
CCGCTTTCCAGTCGGGAAACCTGTCGTGCCAGCTGCATTAATGAATCGGCCAACGCGCGGGGAGAGGCGG
TTTGCGTATTGGGCGCTCTTCCGCTTCCTCGCTCACTGACTCGCTGCGCTCGGTCGTTCGGCTGCGGCGA
GCGGTATCAGCTCACTCAAAGGCGGTAATACGGTTATCCACAGAATCAGGGGATAACGCAGGAAAGAACA
TGTGAGCAAAAGGCCAGCAAAAGGCCAGGAACCGTAAAAAGGCCGCGTTGCTGGCGTTTTTCCATAGGCT
CCGCCCCCCTGACGAGCATCACAAAAATCGACGCTCAAGTCAGAGGTGGCGAAACCCGACAGGACTATAA
AGATACCAGGCGTTTCCCCCTGGAAGCTCCCTCGTGCGCTCTCCTGTTCCGACCCTGCCGCTTACCGGAT
ACCTGTCCGCCTTTCTCCCTTCGGGAAGCGTGGCGCTTTCTCATAGCTCACGCTGTAGGTATCTCAGTTC
GGTGTAGGTCGTTCGCTCCAAGCTGGGCTGTGTGCACGAACCCCCCGTTCAGCCCGACCGCTGCGCCTTA
TCCGGTAACTATCGTCTTGAGTCCAACCCGGTAAGACACGACTTATCGCCACTGGCAGCAGCCACTGGTA
ACAGGATTAGCAGAGCGAGGTATGTAGGCGGTGCTACAGAGTTCTTGAAGTGGTGGCCTAACTACGGCTA
CACTAGAAGAACAGTATTTGGTATCTGCGCTCTGCTGAAGCCAGTTACCTTCGGAAAAAGAGTTGGTAGC
TCTTGATCCGGCAAACAAACCACCGCTGGTAGCGGTGGTTTTTTTGTTTGCAAGCAGCAGATTACGCGCA
GAAAAAAAGGATCTCAAGAAGATCCTTTGATCTTTTCTACGGGGTCTGACACTCAGTGGAACGAAAACTC
ACGTTAAGGGATTTTGGTCATGAGATTATCAAAAAGGATCTTCACCTAGATCCTTTTAAATTAAAAATGA
AGTTTTAAATCAATCTAAAGTATATATGAGTAAACTTGGTCTGACAGTTACCAATGCTTAATCAGTGAGG
CACCTATCTCAGCGATCTGTCTATTTCGTTCATCCATAGTTGCCTGACTCCCCGTCGTGTAGATAACTAC
GATACGGGAGGGCTTACCATCTGGCCCCAGTGCTGCAATGATACCGCGAGACCCACGCTCACCGGCTCCA
GATTTATCAGCAATAAACCAGCCAGCCGGAAGGGCCGAGCGCAGAAGTGGTCCTGCAACTTTATCCGCCT
CCATCCAGTCTATTAATTGTTGCCGGGAAGCTAGAGTAAGTAGTTCGCCAGTTAATAGTTTGCGCAACGT
TGTTGCCATTGCTACAGGCATCGTGGTGTCACGCTCGTCGTTTGGTATGGCTTCATTCAGCTCCGGTTCC
CAACGATCAAGGCGAGTTACATGATCCCCCATGTTGTGCAAAAAAGCGGTTAGCTCCTTCGGTCCTCCGA
TCGTTGTCAGAAGTAAGTTGGCCGCAGTGTTATCACTCATGGTTATGGCAGCACTGCATAATTCTCTTAC
TGTCATGCCATCCGTAAGATGCTTTTCTGTGACTGGTGAGTACTCAACCAAGTCATTCTGAGAATAGTGT
ATGCGGCGACCGAGTTGCTCTTGCCCGGCGTCAATACGGGATAATACCGCGCCACATAGCAGAACTTTAA
AAGTGCTCATCATTGGAAAACGTTCTTCGGGGCGAAAACTCTCAAGGATCTTACCGCTGTTGAGATCCAG
TTCGATGTAACCCACTCGTGCACCCAACTGATCTTCAGCATCTTTTACTTTCACCAGCGTTTCTGGGTGA
GCAAAAACAGGAAGGCAAAATGCCGCAAAAAAGGGAATAAGGGCGACACGGAAATGTTGAATACTCATAC
TCTTCCTTTTTCAATATTATTGAAGCATTTATCAGGGTTATTGTCTCATGAGCGGATACATATTTGAATG
TATTTAGAAAAATAAACAAATAGGGGTTCCGCGCACATTTCCCCGAAAAGTGCCACCTGACGTCGACGGA
TCGGGAGATCGATCTCCCGATCCCCTAGGGTCGACTCTCAGTACAATCTGCTCTGATGCCGCATAGTTAA
GCCAGTATCTGCTCCCTGCTTGTGTGTTGGAGGTCGCTGAGTAGTGCGCGAGCAAAATTTAAGCTACAAC
AAGGCAAGGCTTGACCGACAATTGCATGAAGAATCTGCTTAGGGTTAGGCGTTTTGCGCTGCTTCGCGAT
GTACGGGCCAGATATACGCGTTGACATTGATTATTGACTAGTTATTAATAGTAATCAATTACGGGGTCAT
TAGTTCATAGCCCATATATGGAGTTCCGCGTTACATAACTTACGGTAAATGGCCCGCCTGGCTGACCGCC
CAACGACCCCCGCCCATTGACGTCAATAATGACGTATGTTCCCATAGTAACGCCAATAGGGACTTTCCAT
TGACGTCAATGGGTGGAGTATTTACGGTAAACTGCCCACTTGGCAGTACATCAAGTGTATC

[0072] By way of example, a cytidine base editor (CBE) as used in the base editing compositions, systems and methods described herein has the following nucleic acid sequence (8877 base pairs), (Addgene, Watertown, Mass.; Komor A C, et al., 2017, Sci Adv., 30; 3(8):eaao4774. doi: 10.1126/sciadv.aao4774) as provided below. Polynucleotide sequences having at least 95% or greater identity to the BE4 nucleic acid sequence are also encompassed.

| | |
|---|---|
| 1 | ATATGCCAAG TACGCCCCCT ATTGACGTCA ATGACGGTAA ATGGCCCGCC TGGCATTATG |
| 61 | CCCAGTACAT GACCTTATGG GACTTTCCTA CTTGGCAGTA CATCTACGTA TTAGTCATCG |
| 121 | CTATTACCAT GGTGATGCGG TTTTGGCAGT ACATCAATGG GCGTGGATAG CGGTTTGACT |
| 181 | CACGGGGATT TCCAAGTCTC CACCCCATTG ACGTCAATGG GAGTTTGTTT TGGCACCAAA |
| 241 | ATCAACGGGA CTTTCCAAAA TGTCGTAACA ACTCCGCCCC ATTGACGCAA ATGGGCGGTA |
| 301 | GGCGTGTACG GTGGGAGGTC TATATAAGCA GAGCTGGTTT AGTGAACCGT CAGATCCGCT |
| 361 | AGAGATCCGC GGCCGCTAAT ACGACTCACT ATAGGGAGAG CCGCCACCAT GAGCTCAGAG |
| 421 | ACTGGCCCAG TGGCTGTGGA CCCCACATTG AGACGGCGGA TCGAGCCCCA TGAGTTTGAG |
| 481 | GTATTCTTCG ATCCGAGAGA GCTCCGCAAG GAGACCTGCC TGCTTTACGA AATTAATTGG |
| 541 | GGGGGCCGGC ACTCCATTTG GCGACATACA TCACAGAACA CTAACAAGCA CGTCGAAGTC |
| 601 | AACTTCATCG AGAAGTTCAC GACAGAAAGA TATTTCTGTC CGAACACAAG GTGCAGCATT |
| 661 | ACCTGGTTTC TCAGCTGGAG CCCATGCGGC GAATGTAGTA GGGCCATCAC TGAATTCCTG |
| 721 | TCAAGGTATC CCCACGTCAC TCTGTTTATT TACATCGCAA GGCTGTACCA CCACGCTGAC |
| 781 | CCCCGCAATC GACAAGGCCT GCGGGATTTG ATCTCTTCAG GTGTGACTAT CCAAATTATG |
| 841 | ACTGAGCAGG AGTCAGGATA CTGCTGGAGA AACTTTGTGA ATTATAGCCC GAGTAATGAA |
| 901 | GCCCACTGGC CTAGGTATCC CCATCTGTGG GTACGACTGT ACGTTCTTGA ACTGTACTGC |
| 961 | ATCATACTGG GCCTGCCTCC TTGTCTCAAC ATTCTGAGAA GGAAGCAGCC ACAGCTGACA |
| 1021 | TTCTTTACCA TCGCTCTTCA GTCTTGTCAT TACCAGCGAC TGCCCCCACA CATTCTCTGG |
| 1081 | GCCACCGGGT TGAAATCTGG TGGTTCTTCT GGTGGTTCTA GCGGCAGCGA GACTCCCGGG |
| 1141 | ACCTCAGAGT CCGCCACACC CGAAAGTTCT GGTGGTTCTT CTGGTGGTTC TGATAAAAAG |
| 1201 | TATTCTATTG GTTTAGCCAT CGGCACTAAT TCCGTTGGAT GGGCTGTCAT AACCGATGAA |
| 1261 | TACAAAGTAC CTTCAAAGAA ATTTAAGGTG TTGGGGAACA CAGACCGTCA TTCGATTAAA |
| 1321 | AAGAATCTTA TCGGTGCCCT CCTATTCGAT AGTGGCGAAA CGGCAGAGGC GACTCGCCTG |
| 1381 | AAACGAACCG CTCGGAGAAG GTATACACGT CGCAAGAACC GAATATGTTA CTTACAAGAA |
| 1441 | ATTTTTAGCA ATGAGATGGC CAAAGTTGAC GATTCTTTCT TTCACCGTTT GGAAGAGTCC |
| 1501 | TTCCTTGTCG AAGAGGACAA GAAACATGAA CGGCACCCCA TCTTTGGAAA CATAGTAGAT |
| 1561 | GAGGTGGCAT ATCATGAAAA GTACCCAACG ATTTATCACC TCAGAAAAAA GCTAGTTGAC |
| 1621 | TCAACTGATA AAGCGGACCT GAGGTTAATC TACTTGGCTC TTGCCCATAT GATAAAGTTC |
| 1681 | CGTGGGCACT TTCTCATTGA GGGTGATCTA AATCCGGACA ACTCGGATGT CGACAAACTG |
| 1741 | TTCATCCAGT TAGTACAAAC CTATAATCAG TTGTTTGAAG AGAACCCTAT AAATGCAAGT |
| 1801 | GGCGTGGATG CGAAGGCTAT TCTTAGCGCC CGCCTCTCTA AATCCCGACG GCTAGAAAAC |
| 1861 | CTGATCGCAC AATTACCCGG AGAGAAGAAA AATGGGTTGT TCGGTAACCT TATAGCGCTC |
| 1921 | TCACTAGGCC TGACACCAAA TTTTAAGTCG AACTTCGACT TAGCTGAAGA TGCCAAATTG |
| 1981 | CAGCTTAGTA AGGACACGTA CGATGACGAT CTCGACAATC TACTGGCACA AATTGGAGAT |
| 2041 | CAGTATGCGG ACTTATTTTT GGCTGCCAAA AACCTTAGCG ATGCAATCCT CCTATCTGAC |
| 2101 | ATACTGAGAG TTAATACTGA GATTACCAAG GCGCCGTTAT CCGCTTCAAT GATCAAAAGG |
| 2161 | TACGATGAAC ATCACCAAGA CTTGACACTT CTCAAGGCCC TAGTCCGTCA GCAACTGCCT |
| 2221 | GAGAAATATA AGGAAATATT CTTTGATCAG TCGAAAAACG GGTACGCAGG TTATATTGAC |
| 2281 | GGCGGAGCGA GTCAAGAGGA ATTCTACAAG TTTATCAAAC CCATATTAGA GAAGATGGAT |
| 2341 | GGGACGGAAG AGTTGCTTGT AAAACTCAAT CGCGAAGATC TACTGCGAAA GCAGCGGACT |
| 2401 | TTCGACAACG GTAGCATTCC ACATCAAATC CACTTAGGCG AATTGCATGC TATACTTAGA |
| 2461 | AGGCAGGAGG ATTTTTATCC GTTCCTCAAA GACAATCGTG AAAAGATTGA GAAAATCCTA |
| 2521 | ACCTTTCGCA TACCTTACTA TGTGGGACCC CTGGCCCGAG GGAACTCTCG GTTCGCATGG |
| 2581 | ATGACAAGAA AGTCCGAAGA AACGATTACT CCATGGAATT TTGAGGAAGT TGTCGATAAA |
| 2641 | GGTGCGTCAG CTCAATCGTT CATCGAGAGG ATGACCAACT TTGACAAGAA TTTACCGAAC |
| 2701 | GAAAAAGTAT TGCCTAAGCA CAGTTTACTT TACGAGTATT TCACAGTGTA CAATGAACTC |
| 2761 | ACGAAAGTTA AGTATGTCAC TGAGGGCATG CGTAAACCCG CCTTTCTAAG CGGAGAACAG |
| 2821 | AAGAAAGCAA TAGTAGATCT GTTATTCAAG ACCAACCGCA AAGTGACAGT TAAGCAATTG |
| 2881 | AAAGAGGACT ACTTTAAGAA AATTGAATGC TTCGATTCTG TCGAGATCTC CGGGGTAGAA |
| 2941 | GATCGATTTA ATGCGTCACT TGGTACGTAT CATGACCTCC TAAAGATAAT TAAAGATAAG |
| 3001 | GACTTCCTGG ATAACGAAGA GAATGAAGAT ATCTTAGAAG ATATAGTGTT GACTCTTACC |
| 3061 | CTCTTTGAAG ATCGGGAAAT GATTGAGGAA AGACTAAAAA CATACGCTCA CCTGTTCGAC |
| 3121 | GATAAGGTTA TGAAACAGTT AAAGAGGCGT CGCTATACGG GCTGGGGACG ATTGTCGCGG |
| 3181 | AAACTTATCA ACGGGATAAG AGACAAGCAA AGTGGTAAAA CTATTCTCGA TTTTCTAAAG |
| 3241 | AGCGACGGCT TCGCCAATAG GAACTTTATG CAGCTGATCC ATGATGACTC TTTAACCTTC |
| 3301 | AAAGAGGATA TACAAAAGGC ACAGGTTTCC GGACAAGGGG ACTCATTGCA CGAACATATT |
| 3361 | GCGAATCTTG CTGGTTCGCC AGCCATCAAA AAGGGCATAC TCCAGACAGT CAAAGTAGTG |
| 3421 | GATGAGCTAG TTAAGGTCAT GGGACGTCAC AAACCGGAAA ACATTGTAAT CGAGATGGCA |
| 3481 | CGCGAAAATC AAACGACTCA GAAGGGGCAA AAAAACAGTC GAGAGCGGAT GAAGAGAATA |
| 3541 | GAAGAGGGTA TTAAAGAACT GGGCAGCCAG ATCTTAAAGG AGCATCCTGT GGAAAATACC |
| 3601 | CAATTGCAGA ACGAGAAACT TTACCTCTAT TACCTACAAA ATGGAAGGGA CATGTATGTT |
| 3661 | GATCAGGAAC TGGACATAAA CCGTTTATCT GATTACGACG TCGATCACAT TGTACCCCAA |
| 3721 | TCCTTTTTGA AGGACGATTC AATCGACAAT AAAGTGCTTA CACGCTCGGA TAAGAACCGA |
| 3781 | GGGAAAAGTG ACAATGTTCC AAGCGAGGAA GTCGTAAAGA AAATGAAGAA CTATTGGCGG |
| 3841 | CAGCTCCTAA ATGCGAAACT GATAACGCAA AGAAAGTTCG ATAACTTAAC TAAAGCTGAG |
| 3901 | AGGGGTGGCT TGTCTGAACT TGACAAGGCC GGATTTATTA AACGTCAGCT CGTGGAAACC |
| 3961 | CGCCAAATCA CAAAGCATGT TGCACAGATA CTAGATTCCC GAATGAATAC GAAATACGAC |
| 4021 | GAGAACGATA AGCTGATTCG GGAAGTCAAA GTAATCACTT TAAAGTCAAA ATTGGTGTCG |
| 4081 | GACTTCAGAA AGGATTTTCA ATTCTATAAA GTTAGGGAGA TAAATAACTA CCACCATGCG |
| 4141 | CACGACGCTT ATCTTAATGC CGTCGTAGGG ACCGCACTCA TTAAGAAATA CCCGAAGCTA |
| 4201 | GAAAGTGAGT TTGTGTATGG TGATTACAAA GTTTATGACG TCCGTAAGAT GATCGCGAAA |
| 4261 | AGCGAACAGG AGATAGGCAA GGCTACAGCC AAATACTTCT TTTATTCTAA CATTATGAAT |
| 4321 | TTCTTTAAGA CGGAAATCAC TCTGGCAAAC GGAGAGATAC GCAAACGACC TTTAATTGAA |
| 4381 | ACCAATGGGG AGACAGGTGA AATCGTATGG GATAAGGGCC GGGACTTCGC GACGGTGAGA |
| 4441 | AAAGTTTTGT CCATGCCCCA AGTCAACATA GTAAAGAAAA CTGAGGTGCA GACCGGAGGG |
| 4501 | TTTTCAAAGG AATCGATTCT TCCAAAAAGG AATAGTGATA AGCTCATCGC TCGTAAAAAG |
| 4561 | GACTGGGACC CGAAAAAGTA CGGTGGCTTC GATAGCCCTA CAGTTGCCTA TTCTGTCCTA |
| 4621 | GTAGTGGCAA AAGTTGAGAA GGGAAAATCC AAGAAACTGA AGTCAGTCAA AGAATTATTG |
| 4681 | GGGATAACGA TTATGGAGCG CTCGTCTTTT GAAAAGAACC CCATCGACTT CCTTGAGGCG |
| 4741 | AAAGGTTACA AGGAAGTAAA AAAGGATCTC ATAATTAAAC TACCAAAGTA TAGTCTGTTT |
| 4801 | GAGTTAGAAA ATGGCCGAAA ACGGATGTTG GCTAGCGCCG GAGAGCTTCA AAAGGGGAAC |
| 4861 | GAACTCGCAC TACCGTCTAA ATACGTGAAT TTCCTGTATT TAGCGTCCCA TTACGAGAAG |
| 4921 | TTGAAAGGTT CACCTGAAGA TAACGAACAG AAGCAACTTT TTGTTGAGCA GCACAAACAT |
| 4981 | TATCTCGACG AAATCATAGA GCAAATTTCG GAATTCAGTA AGAGAGTCAT CCTAGCTGAT |
| 5041 | GCCAATCTGG ACAAAGTATT AAGCGCATAC AACAAGCACA GGGATAAACC CATACGTGAG |
| 5101 | CAGGCGGAAA ATATTATCCA TTTGTTTACT CTTACCAACC TCGGCGCTCC AGCCGCATTC |
| 5161 | AAGTATTTTG ACACAACGAT AGATCGCAAA CGATACACTT CTACCAAGGA GGTGCTAGAC |
| 5221 | GCGACACTGA TTCACCAATC CATCACGGGA TTATATGAAA CTCGGATAGA TTTGTCACAG |
| 5281 | CTTGGGGGTG ACTCTGGTGG TTCTGGAGGA TCTGGTGGTT CTACTAATCT GTCAGATATT |
| 5341 | ATTGAAAAGG AGACCGGTAA GCAACTGGTT ATCCAGGAAT CCATCCTCAT GCTCCCAGAG |
| 5401 | GAGGTGGAAG AAGTCATTGG GAACAAGCCG GAAAGCGATA TACTCGTGCA CACCGCCTAC |
| 5461 | GACGAGAGCA CCGACGAGAA TGTCATGCTT CTGACTAGCG ACGCCCCTGA ATACAAGCCT |
| 5521 | TGGGCTCTGG TCATACAGGA TAGCAACGGT GAGAACAAGA TTAAGATGCT CTCTGGTGGT |
| 5581 | TCTGGAGGAT CTGGTGGTTC TACTAATCTG TCAGATATTA TTGAAAAGGA GACCGGTAAG |
| 5641 | CAACTGGTTA TCCAGGAATC CATCCTCATG CTCCCAGAGG AGGTGGAAGA AGTCATTGGG |
| 5701 | AACAAGCCGG AAAGCGATAT ACTCGTGCAC ACCGCCTACG ACGAGAGCAC CGACGAGAAT |
| 5761 | GTCATGCTTC TGACTAGCGA CGCCCCTGAA TACAAGCCTT GGGCTCTGGT CATACAGGAT |
| 5821 | AGCAACGGTG AGAACAAGAT TAAGATGCTC TCTGGTGGTT CTCCCAAGAA GAAGAGGAAA |
| 5881 | GTCTAACCGG TCATCATCAC CATCACCATT GAGTTTAAAC CCGCTGATCA GCCTCGACTG |
| 5941 | TGCCTTCTAG TTGCCAGCCA TCTGTTGTTT GCCCCTCCCC CGTGCCTTCC TTGACCCTGG |
| 6001 | AAGGTGCCAC TCCCACTGTC CTTTCCTAAT AAAATGAGGA AATTGCATCG CATTGTCTGA |
| 6061 | GTAGGTGTCA TTCTATTCTG GGGGGTGGGG TGGGGCAGGA CAGCAAGGGG GAGGATTGGG |
| 6121 | AAGACAATAG CAGGCATGCT GGGGATGCGG TGGGCTCTAT GGCTTCTGAG GCGGAAAGAA |
| 6181 | CCAGCTGGGG CTCGATACCG TCGACCTCTA GCTAGAGCTT GGCGTAATCA TGGTCATAGC |
| 6241 | TGTTTCCTGT GTGAAATTGT TATCCGCTCA CAATTCCACA CAACATACGA GCCGGAAGCA |
| 6301 | TAAAGTGTAA AGCCTAGGGT GCCTAATGAG TGAGCTAACT CACATTAATT GCGTTGCGCT |
| 6361 | CACTGCCCGC TTTCCAGTCG GGAAACCTGT CGTGCCAGCT GCATTAATGA ATCGGCCAAC |
| 6421 | GCGCGGGGAG AGGCGGTTTG CGTATTGGGC GCTCTTCCGC TTCCTCGCTC ACTGACTCGC |
| 6481 | TGCGCTCGGT CGTTCGGCTG CGGCGAGCGG TATCAGCTCA CTCAAAGGCG GTAATACGGT |
| 6541 | TATCCACAGA ATCAGGGGAT AACGCAGGAA AGAACATGTG AGCAAAAGGC CAGCAAAAGG |
| 6601 | CCAGGAACCG TAAAAAGGCC GCGTTGCTGG CGTTTTTCCA TAGGCTCCGC CCCCCTGACG |
| 6661 | AGCATCACAA AAATCGACGC TCAAGTCAGA GGTGGCGAAA CCCGACAGGA CTATAAAGAT |
| 6721 | ACCAGGCGTT TCCCCCTGGA AGCTCCCTCG TGCGCTCTCC TGTTCCGACC CTGCCGCTTA |
| 6781 | CCGGATACCT GTCCGCCTTT CTCCCTTCGG GAAGCGTGGC GCTTTCTCAT AGCTCACGCT |
| 6841 | GTAGGTATCT CAGTTCGGTG TAGGTCGTTC GCTCCAAGCT GGGCTGTGTG CACGAACCCC |
| 6901 | CCGTTCAGCC CGACCGCTGC GCCTTATCCG GTAACTATCG TCTTGAGTCC AACCCGGTAA |
| 6961 | GACACGACTT ATCGCCACTG GCAGCAGCCA CTGGTAACAG GATTAGCAGA GCGAGGTATG |
| 7021 | TAGGCGGTGC TACAGAGTTC TTGAAGTGGT GGCCTAACTA CGGCTACACT AGAAGAACAG |
| 7081 | TATTTGGTAT CTGCGCTCTG CTGAAGCCAG TTACCTTCGG AAAAAGAGTT GGTAGCTCTT |
| 7141 | GATCCGGCAA ACAAACCACC GCTGGTAGCG GTGGTTTTTT TGTTTGCAAG CAGCAGATTA |
| 7201 | CGCGCAGAAA AAAAGGATCT CAAGAAGATC CTTTGATCTT TTCTACGGGG TCTGACGCTC |
| 7261 | AGTGGAACGA AAACTCACGT TAAGGGATTT TGGTCATGAG ATTATCAAAA AGGATCTTCA |
| 7321 | CCTAGATCCT TTTAAATTAA AAATGAAGTT TTAAATCAAT CTAAAGTATA TATGAGTAAA |
| 7381 | CTTGGTCTGA CAGTTACCAA TGCTTAATCA GTGAGGCACC TATCTCAGCG ATCTGTCTAT |
| 7441 | TTCGTTCATC CATAGTTGCC TGACTCCCCG TCGTGTAGAT AACTACGATA CGGGAGGGCT |
| 7501 | TACCATCTGG CCCCAGTGCT GCAATGATAC CGCGAGACCC ACGCTCACCG GCTCCAGATT |
| 7561 | TATCAGCAAT AAACCAGCCA GCCGGAAGGG CCGAGCGCAG AAGTGGTCCT GCAACTTTAT |
| 7621 | CCGCCTCCAT CCAGTCTATT AATTGTTGCC GGGAAGCTAG AGTAAGTAGT TCGCCAGTTA |
| 7681 | ATAGTTTGCG CAACGTTGTT GCCATTGCTA CAGGCATCGT GGTGTCACGC TCGTCGTTTG |
| 7741 | GTATGGCTTC ATTCAGCTCC GGTTCCCAAC GATCAAGGCG AGTTACATGA TCCCCCATGT |
| 7801 | TGTGCAAAAA AGCGGTTAGC TCCTTCGGTC CTCCGATCGT TGTCAGAAGT AAGTTGGCCG |
| 7861 | CAGTGTTATC ACTCATGGTT ATGGCAGCAC TGCATAATTC TCTTACTGTC ATGCCATCCG |
| 7921 | TAAGATGCTT TTCTGTGACT GGTGAGTACT CAACCAAGTC ATTCTGAGAA TAGTGTATGC |
| 7981 | GGCGACCGAG TTGCTCTTGC CCGGCGTCAA TACGGGATAA TACCGCGCCA CATAGCAGAA |
| 8041 | CTTTAAAAGT GCTCATCATT GGAAAACGTT CTTCGGGGCG AAAACTCTCA AGGATCTTAC |
| 8101 | CGCTGTTGAG ATCCAGTTCG ATGTAACCCA CTCGTGCACC CAACTGATCT TCAGCATCTT |
| 8161 | TTACTTTCAC CAGCGTTTCT GGGTGAGCAA AAACAGGAAG GCAAAATGCC GCAAAAAAGG |
| 8221 | GAATAAGGGC GACACGGAAA TGTTGAATAC TCATACTCTT CCTTTTTCAA TATTATTGAA |
| 8281 | GCATTTATCA GGGTTATTGT CTCATGAGCG GATACATATT TGAATGTATT TAGAAAAATA |
| 8341 | AACAAATAGG GGTTCCGCGC ACATTTCCCC GAAAAGTGCC ACCTGACGTC GACGGATCGG |
| 8401 | GAGATCGATC TCCCGATCCC CTAGGGTCGA CTCTCAGTAC AATCTGCTCT GATGCCGCAT |
| 8461 | AGTTAAGCCA GTATCTGCTC CCTGCTTGTG TGTTGGAGGT CGCTGAGTAG TGCGCGAGCA |
| 8521 | AAATTTAAGC TACAACAAGG CAAGGCTTGA CCGACAATTG CATGAAGAAT CTGCTTAGGG |
| 8581 | TTAGGCGTTT TGCGCTGCTT CGCGATGTAC GGGCCAGATA TACGCGTTGA CATTGATTAT |
| 8641 | TGACTAGTTA TTAATAGTAA TCAATTACGG GGTCATTAGT TCATAGCCCA TATATGGAGT |
| 8701 | TCCGCGTTAC ATAACTTACG GTAAATGGCC CGCCTGGCTG ACCGCCCAAC GACCCCCGCC |
| 8761 | CATTGACGTC AATAATGACG TATGTTCCCA TAGTAACGCC AATAGGGACT TTCCATTGAC |
| 8821 | GTCAATGGGT GGAGTATTTA CGGTAAACTG CCCACTTGGC AGTACATCAA GTGTATC |

[0073] In some embodiments, the cytidine base editor is BE4 having a nucleic acid sequence selected from one of the following:

Original BE4 nucleic acid sequence:
ATGagctcagagactggcccagtggctgtggaccccacattgagacggcggatcgagccccatgagtt
tgaggtattcttcgatccgagagagctccgcaaggagacctgcctgctttacgaaattaattgggggg
gccggcactccatttggcgacatacatcacagaacactaacaagcacgtcgaagtcaacttcatcgag
aagttcacgacagaaagatatttctgtccgaacacaaggtgcagcattacctggtttctcagctggag
ccgcgaatgtagtagggccatcactgaattcctgtcaaggtatccccacgtcactctgtttatttaca
tcgcaaggctgtaccaccacgctgacccccgcaatcgacaaggcctgcgggatttgatctcttcaggt
gtgactatccaaattatgactgagcaggagtcaggatactgctggagaaactttgtgaattatagccc
gagtaatgaagcccactggcctaggtatccccatctgtgggtacgactgtacgttcttgaactgtact
gcatcatactgggcctgcctccttgtctcaacattctgagaaggaagcagccacagctgacattcttt
accatcgctcttcagtcttgtcattaccagcgactgcccccacacattctctgggccaccgggttgaa
atctggtggttcttctggtggttctagcggcagcgagactcccgggacctcagagtccgccacacccg
aaagttctggtggttcttctggtggttctgataaaaagtattctattggtttagccatcggcactaat
tccgttggatgggctgtcataaccgatgaatacaaagtaccttcaaagaaatttaaggtgttggggaa
cacagaccgtcattcgattaaaaagaatcttatcggtgccctcctattcgatagtggcgaaacggcag
aggcgactcgcctgaaacgaaccgctcggagaaggtatacacgtcgcaagaaccgaatatgttactta
caagaaatttttagcaatgagatggccaaagttgacgattctttctttcaccgtttggaagagtcctt
ccttgtcgaagaggacaagaaacatgaacggcaccccatctttggaaacatagtagatgaggtggcat
atcatgaaaagtacccaacgatttatcacctcagaaaaaagctagttgactcaactgataaagcggac
ctgaggttaatctacttggctcttgcccatatgataaagttccgtgggcactttctcattgagggtga
tctaaatccggacaactcggatgtcgacaaactgttcatccagttagtacaaacctataatcagttgt
ttgaagagaaccctataaatgcaagtggcgtggatgcgaaggctattcttagcgcccgcctctctaaa
tcccgacggctagaaaacctgatcgcacaattacccggagagaagaaaaatgggttgttcggtaacct
tatagcgctctcactaggcctgacaccaaattttaagtcgaacttcgacttagctgaagatgccaaat
tgcagcttagtaaggacacgtacgatgacgatctcgacaatctactggcacaaattggagatcagtat
gcggacttatttttggctgccaaaaaccttagcgatgcaatcctcctatctgacatactgagagttaa
tactgagattaccaaggcgccgttatccgcttcaatgatcaaaaggtacgatgaacatcaccaagact
tgacacttctcaaggccctagtccgtcagcaactgcctgagaaatataaggaaatattctttgatcag
tcgaaaaacgggtacgcaggttatattgacggcggagcgagtcaagaggaattctacaagtttatcaa
acccatattagagaagatggatgggacggaagagttgcttgtaaaactcaatcgcgaagatctactgc
gaaagcagcggactttcgacaacggtagcattccacatcaaatccacttaggcgaattgcatgctata
cttagaaggcaggaggatttttatccgttcctcaaagacaatcgtgaaaagattgagaaaatcctaac
ctttcgcataccttactatgtgggacccctggcccgagggaactctcggttcgcatggatgacaagaa
agtccgaagaaacgattactccatggaattttgaggaagttgtcgataaaggtgcgtcagctcaatcg
ttcatcgagaggatgaccaactttgacaagaatttaccgaacgaaaaagtattgcctaagcacagttt
actttacgagtatttcacagtgtacaatgaactcacgaaagttaagtatgtcactgagggcatgcgta
aacccgcctttctaagcggagaacagaagaaagcaatagtagatctgttattcaagaccaaccgcaaa
gtgacagttaagcaattgaaagaggactactttaagaaaattgaatgcttcgattctgtcgagatctc
cggggtagaagatcgatttaatgcgtcacttggtacgtatcatgacctcctaaagataattaaagata
aggacttcctggataacgaagagaatgaagatatcttagaagatatagtgttgactcttaccctcttt
gaagatcgggaaatgattgaggaaagactaaaaacatacgctcacctgttcgacgataaggttatgaa
acagttaaagaggcgtcgctatacgggctggggacgattgtcgcggaaacttatcaacgggataagag
acaagcaaagtggtaaaactattctcgattttctaaagagcgacggcttcgccaataggaactttatg
cagctgatccatgatgactctttaaccttcaaagaggatatacaaaaggcacaggtttccggacaagg
ggactcattgcacgaacatattgcgaatcttgctggttcgccagccatcaaaaagggcatactccaga
cagtcaaagtagtggatgagctagttaaggtcatgggacgtcacaaaccggaaaacattgtaatcgag
atggcacgcgaaaatcaaacgactcagaaggggcaaaaaaacagtcgagagcggatgaagagaataga
agagggtattaaagaactgggcagccagatcttaaaggagcatcctgtggaaaatacccaattgcaga
acgagaaactttacctctattacctacaaaatggaagggacatgtatgttgatcaggaactggacata
aaccgtttatctgattacgacgtcgatcacattgtaccccaatcctttttgaaggacgattcaatcga
caataaagtgcttacacgctcggataagaaccgagggaaaagtgacaatgttccaagcgaggaagtcg
taaagaaaatgaagaactattggcggcagctcctaaatgcgaaactgataacgcaaagaaagttcgat
aacttaactaaagctgagaggggtggcttgtctgaacttgacaaggccggatttattaaacgtcagct
cgtggaaacccgccaaatcacaaagcatgttgcacagatactagattcccgaatgaatacgaaatacg
acgagaacgataagctgattcgggaagtcaaagtaatcactttaaagtcaaaattggtgtcggacttc
agaaaggattttcaattctataaagttagggagataaataactaccaccatgcgcacgacgcttatct
taatgccgtcgtagggaccgcactcattaagaaatacccgaagctagaaagtgagtttgtgtatggtg
attacaaagtttatgacgtccgtaagatgatcgcgaaaagcgaacaggagataggcaaggctacagcc
aaatacttcttttattctaacattatgaatttctttaagacggaaatcactctggcaaacggagagat
acgcaaacgacctttaattgaaaccaatggggagacaggtgaaatcgtatgggataagggccgggact
tcgcgacggtgagaaaagttttgtccatgccccaagtcaacatagtaaagaaaactgaggtgcagacc
ggagggttttcaaaggaatcgattcttccaaaaaggaatagtgataagctcatcgctcgtaaaaagga
ctgggacccgaaaaagtacggtggcttcgatagccctacagttgcctattctgtcctagtagtggcaa
aagttgagaagggaaaatccaagaaactgaagtcagtcaaagaattattggggataacgattatggag
cgctcgtcttttgaaaagaaccccatcgacttccttgaggcgaaaggttacaaggaagtaaaaaagga
tctcataattaaactaccaaagtatagtctgtttgagttagaaaatggccgaaaacggatgttggcta
gcgccggagagcttcaaaaggggaacgaactcgcactaccgtctaaatacgtgaatttcctgtattta
gcgtcccattacgagaagttgaaaggttcacctgaagataacgaacagaagcaactttttgttgagca
gcacaaacattatctcgacgaaatcatagagcaaatttcggaattcagtaagagagtcatcctagctg
atgccaatctggacaaagtattaagcgcatacaacaagcacagggataaacccatacgtgagcaggcg
gaaaatattatccatttgtttactcttaccaacctcggcgctccagccgcattcaagtattttgacac
aacgatagatcgcaaacgatacacttctaccaaggaggtgctagacgcgacactgattcaccaatcca
tcacgggattatatgaaactcggatagatttgtcacagcttgggggtgactctggtggttctggagga
tctggtggttctactaatctgtcagatattattgaaaaggagaccggtaagcaactggttatccagga
atccatcctcatgctcccagaggaggtggaagaagtcattgggaacaagccggaaagcgatatactcg
tgcacaccgcctacgacgagagcaccgacgagaatgtcatgcttctgactagcgacgcccctgaatac
aagccttgggctctggtcatacaggatagcaacggtgagaacaagattaagatgctctctggtggttc
tggaggatctggtggttctactaatctgtcagatattattgaaaaggagaccggtaagcaactggtta
tccaggaatccatcctcatgctcccagaggaggtggaagaagtcattgggaacaagccggaaagcgat
atactcgtgcacaccgcctacgacgagagcaccgacgagaatgtcatgcttctgactagcgacgcccc
tgaatacaagccttgggctctggtcatacaggatagcaacggtgagaacaagattaagatgctctctg
gtggttctAAAAGGACGGCGGACGGATCAGAGTTCGAGAGTCCGAAAAAAAAACGAAAGGTCGAAtaa
BE4 Codon Optimization 1 nucleic acid sequence:
ATGTCATCCGAAACCGGGCCAGTGGCCGTAGACCCAACACTCAGGAGGCGGATAGAACCCCATGAGTT
TGAAGTGTTCTTCGACCCCAGAGAGCTGCGCAAAGAGACTTGCCTCCTGTATGAAATAAATTGGGGGG
GTCGCCATTCAATTTGGAGGCACACTAGCCAGAATACTAACAAACACGTGGAGGTAAATTTTATCGAG
AAGTTTACCACCGAAAGATACTTTTGCCCCAATACACGGTGTTCAATTACCTGGTTTCTGTCATGGAG
TCCATGTGGAGAATGTAGTAGAGCGATAACTGAGTTCCTGTCTCGATATCCTCACGTCACGTTGTTTA
TATACATCGCTCGGCTTTATCACCATGCGGACCCGCGGAACAGGCAAGGTCTTCGGGACCTCATATCC
TCTGGGGTGACCATCCAGATAATGACGGAGCAAGAGAGCGGATACTGCTGGCGAAACTTTGTTAACTA
CAGCCCAAGCAATGAGGCACACTGGCCTAGATATCCGCATCTCTGGGTTCGACTGTATGTCCTTGAAC
TGTACTGCATAATTCTGGGACTTCCGCCATGCTTGAACATTCTGCGGCGGAAACAACCACAGCTGACC
TTTTTCACGATTGCTCTCCAAAGTTGTCACTACCAGCGATTGCCACCCCACATCTTGTGGGCTACTGG
ACTCAAGTCTGGAGGAAGTTCAGGCGGAAGCAGCGGGTCTGAAACGCCCGGAACCTCAGAGAGCGCAA
CGCCCGAAAGCTCTGGAGGGTCAAGTGGTGGTAGTGATAAGAAATACTCCATCGGCCTCGCCATCGGT
ACGAATTCTGTCGGTTGGGCCGTTATCACCGATGAGTACAAGGTCCCTTCTAAGAAATTCAAGGTTTT
GGGCAATACAGACCGCCATTCTATAAAAAAAAACCTGATCGGCGCCCTTTTGTTTGACAGTGGTGAGA
CTGCTGAAGCGACTCGCCTGAAGCGAACTGCCAGGAGGCGGTATACGAGGCGAAAAAACCGAATTTGT
TACCTCCAGGAGATTTTCTCAAATGAAATGGCCAAGGTAGATGATAGTTTTTTTCACCGCTTGGAAGA
AAGTTTTCTCGTTGAGGAGGACAAAAAGCACGAGAGGCACCCAATCTTTGGCAACATAGTCGATGAGG
TCGCATACCATGAGAAATATCCTACGATCTATCATCTCCGCAAGAAGCTGGTCGATAGCACGGATAAA
GCTGACCTCCGGCTGATCTACCTTGCTCTTGCTCACATGATTAAATTCAGGGGCCATTTCCTGATAGA
AGGAGACCTCAATCCCGACAATTCTGATGTCGACAAACTGTTTATTCAGCTCGTTCAGACCTATAATC
AACTCTTTGAGGAGAACCCCATCAATGCTTCAGGGGTGGACGCAAAGGCCATTTTGTCCGCGCGCTTG
AGTAAATCACGACGCCTCGAGAATTTGATAGCTCAACTGCCGGGTGAGAAGAAAAACGGGTTGTTTGG
GAATCTCATAGCGTTGAGTTTGGGACTTACGCCAAACTTTAAGTCTAACTTTGATTTGGCCGAAGATG
CCAAATTGCAGCTGTCCAAAGATACCTATGATGACGACTTGGATAACCTTCTTGCGCAGATTGGTGAC
CAATACGCGGATCTGTTTCTTGCCGCAAAAAATCTGTCCGACGCCATACTCTTGTCCGATATACTGCG
CGTCAATACTGAGATAACTAAGGCTCCCCTCAGCGCGTCCATGATTAAAAGATACGATGAGCACCACC
AAGATCTCACTCTGTTGAAAGCCCTGGTTCGCCAGCAGCTTCCAGAGAAGTATAAGGAGATATTTTTC
GACCAATCTAAAAACGGCTATGCGGGTTACATTGACGGTGGCGCCTCTCAAGAAGAATTCTACAAGTT
TATAAAGCCGATACTTGAGAAAATGGACGGTACAGAGGAATTGTTGGTTAAGCTCAATCGCGAGGACT
TGTTGAGAAAGCAGCGCACATTTGACAATGGTAGTATTCCACACCAGATTCATCTGGGCGAGTTGCAT
GCCATTCTTAGAAGACAAGAAGATTTTTATCCGTTTCTGAAAGATAACAGAGAAAAGATTGAAAAGAT
ACTTACCTTTCGCATACCGTATTATGTAGGTCCCCTGGCTAGAGGGAACAGTCGCTTCGCTTGGATGA
CTCGAAAATCAGAAGAAACAATAACCCCCTGGAATTTTGAAGAAGTGGTAGATAAAGGTGCGAGTGCC
CAATCTTTTATTGAGCGGATGACAAATTTTGACAAGAATCTGCCTAACGAAAAGGTGCTTCCCAAGCA
TTCCCTTTTGTATGAATACTTTACAGTATATAATGAACTGACTAAAGTGAAGTACGTTACCGAGGGGA
TGCGAAAGCCAGCTTTTCTCAGTGGCGAGCAGAAAAAAGCAATAGTTGACCTGCTGTTCAAGACGAAT
AGGAAGGTTACCGTCAAACAGCTCAAAGAAGATTACTTTAAAAAGATCGAATGTTTTGATTCAGTTGA
GATAAGCGGAGTAGAGGATAGATTTAACGCAAGTCTTGGAACTTATCATGACCTTTTGAAGATCATCA
AGGATAAAGATTTTTTGGACAACGAGGAGAATGAAGATATCCTGGAAGATATAGTACTTACCTTGACG
CTTTTTGAAGATCGAGAGATGATCGAGGAGCGACTTAAGACGTACGCACATCTCTTTGACGATAAGGT
TATGAAACAATTGAAACGCCGGCGGTATACTGGCTGGGGCAGGCTTTCTCGAAAGCTGATTAATGGTA
TCCGCGATAAGCAGTCTGGAAAGACAATCCTTGACTTTCTGAAAAGTGATGGATTTGCAAATAGAAAC
TTTATGCAGCTTATACATGATGACTCTTTGACGTTCAAGGAAGACATCCAGAAGGCACAGGTATCCGG
CCAAGGGGATAGCCTCCATGAACACATAGCCAACCTGGCCGGCTCACCAGCTATTAAAAAGGGAATAT
TGCAAACCGTTAAGGTTGTTGACGAACTCGTTAAGGTTATGGGCCGACACAAACCAGAGAATATCGTG
ATTGAGATGGCTAGGGAGAATCAGACCACTCAAAAAGGTCAGAAAAATTCTCGCGAAAGGATGAAGCG
AATTGAAGAGGGAATCAAAGAACTTGGCTCTCAAATTTTGAAAGAGCACCCGGTAGAAAACACTCAGC
TGCAGAATGAAAAGCTGTATCTGTATTATCTGCAGAATGGTCGAGATATGTACGTTGATCAGGAGCTG
GATATCAATAGGCTCAGTGACTACGATGTCGACCACATCGTTCCTCAATCTTTCCTGAAAGATGACTC
TATCGACAACAAAGTGTTGACGCGATCAGATAAGAACCGGGGAAAATCCGACAATGTACCCTCAGAAG
AAGTTGTCAAGAAGATGAAAAACTATTGGAGACAATTGCTGAACGCCAAGCTCATAACACAACGCAAG
TTCGATAACTTGACGAAAGCCGAAAGAGGTGGGTTGTCAGAATTGGACAAAGCTGGCTTTATTAAGCG
CCAATTGGTGGAGACCCGGCAGATTACGAAACACGTAGCACAAATTTTGGATTCACGAATGAATACCA
AATACGACGAAAACGACAAATTGATACGCGAGGTGAAAGTGATTACGCTTAAGAGTAAGTTGGTTTCC
GATTTCAGGAAGGATTTTCAGTTTTACAAAGTAAGAGAAATAAACAACTACCACCACGCCCATGATGC
TTACCTCAACGCGGTAGTTGGCACAGCTCTTATCAAAAAATATCCAAAGCTGGAAAGCGAGTTCGTTT
ACGGTGACTATAAAGTATACGACGTTCGGAAGATGATAGCCAAATCAGAGCAGGAAATTGGGAAGGCA
ACCGCAAAATACTTCTTCTATTCAAACATCATGAACTTCTTTAAGACGGAGATTACGCTCGCGAACGG
CGAAATACGCAAGAGGCCCCTCATAGAGACTAACGGCGAAACCGGGGAGATCGTATGGGACAAAGGAC
GGGACTTTGCGACCGTTAGAAAAGTACTTTCAATGCCACAAGTGAATATTGTTAAAAAGACAGAAGTA
CAAACAGGGGGGTTCAGTAAGGAATCCATTTTGCCCAAGCGGAACAGTGATAAATTGATAGCAAGGAA
AAAAGATTGGGACCCTAAGAAGTACGGTGGTTTCGACTCTCCTACCGTTGCATATTCAGTCCTTGTAG
TTGCGAAAGTGGAAAAGGGGAAAAGTAAGAAGCTTAAGAGTGTTAAAGAGCTTCTGGGCATAACCATA
ATGGAACGGTCTAGCTTCGAGAAAAATCCAATTGACTTTCTCGAGGCTAAAGGTTACAAGGAGGTAAA
AAAGGACCTGATAATTAAACTCCCAAAGTACAGTCTCTTCGAGTTGGAGAATGGGAGGAAGAGAATGT
TGGCATCTGCAGGGGAGCTCCAAAAGGGGAACGAGCTGGCTCTGCCTTCAAAATACGTGAACTTTCTG
TACCTGGCCAGCCACTACGAGAAACTCAAGGGTTCTCCTGAGGATAACGAGCAGAAACAGCTGTTTGT
AGAGCAGCACAAGCATTACCTGGACGAGATAATTGAGCAAATTAGTGAGTTCTCAAAAAGAGTAATCC
TTGCAGACGCGAATCTGGATAAAGTTCTTTCCGCCTATAATAAGCACCGGGACAAGCCTATACGAGAA
CAAGCCGAGAACATCATTCACCTCTTTACCCTTACTAATCTGGGCGCGCCGGCCGCCTTCAAATACTT
CGACACCACGATAGACAGGAAAAGGTATACGAGTACCAAAGAAGTACTTGACGCCACTCTCATCCACC
AGTCTATAACAGGGTTGTACGAAACGAGGATAGATTTGTCCCAGCTCGGCGGCGACTCAGGAGGGTCA
GGCGGCTCCGGTGGATCAACGAATCTTTCCGACATAATCGAGAAAGAAACCGGCAAACAGTTGGTGAT
CCAAGAATCAATCCTGATGCTGCCTGAAGAAGTAGAAGAGGTGATTGGCAACAAACCTGAGTCTGACA
TTCTTGTCCACACCGCGTATGACGAGAGCACGGACGAGAACGTTATGCTTCTCACTAGCGACGCCCCT
GAGTATAAACCATGGGCGCTGGTCATCCAAGATTCCAATGGGGAAAACAAGATTAAGATGCTTAGTGG
TGGGTCTGGAGGGAGCGGTGGGTCCACGAACCTCAGCGACATTATTGAAAAAGAGACTGGTAAACAAC
TTGTAATACAAGAGTCTATTCTGATGTTGCCTGAAGAGGTGGAGGAGGTGATTGGGAACAAACCGGAG
TCTGATATACTTGTTCATACCGCCTATGACGAATCTACTGATGAGAATGTGATGCTTTTaACGTCAGA
CGCTCCCGAGTACAAACCCTGGGCTCTGGTGATTCAGGACAGCAATGGTGAGAATAAGATTAAAATGT
TGAGTGGGGGCTCAAAGCGCACGGCTGACGGTAGCGAATTTGAGAGCCCCAAAAAAAAACGAAAGGTC
GAAtaa
BE4 Codon Optimization 2 nucleic acid sequence:
ATGAGCAGCGAGACAGGCCCTGTGGCTGTGGATCCTACACTGCGGAGAAGAATCGAGCCCCACGAGTT
CGAGGTGTTCTTCGACCCCAGAGAGCTGCGGAAAGAGACATGCCTGCTGTACGAGATCAACTGGGGCG
GCAGACACTCTATCTGGCGGCACACAAGCCAGAACACCAACAAGCACGTGGAAGTGAACTTTATCGAG
AAGTTTACGACCGAGCGGTACTTCTGCCCCAACACCAGATGCAGCATCACCTGGTTTCTGAGCTGGTC
CCCTTGCGGCGAGTGCAGCAGAGCCATCACCGAGTTTCTGTCCAGATATCCCCACGTGACCCTGTTCA
TCTATATCGCCCGGCTGTACCACCACGCCGATCCTAGAAATAGACAGGGACTGCGCGACCTGATCAGC
AGCGGAGTGACCATCCAGATCATGACCGAGCAAGAGAGCGGCTACTGCTGGCGGAACTTCGTGAACTA
CAGCCCCAGCAACGAAGCCCACTGGCCTAGATATCCTCACCTGTGGGTCCGACTGTACGTGCTGGAAC
TGTACTGCATCATCCTGGGCCTGCCTCCATGCCTGAACATCCTGAGAAGAAAGCAGCCTCAGCTGACC
TTCTTCACAATCGCCCTGCAGAGCTGCCACTACCAGAGACTGCCTCCACACATCCTGTGGGCCACCGG
ACTTAAGAGCGGAGGATCTAGCGGCGGCTCTAGCGGATCTGAGACACCTGGCACAAGCGAGTCTGCCA
CACCTGAGAGTAGCGGCGGATCTTCTGGCGGCTCCGACAAGAAGTACTCTATCGGACTGGCCATCGGC
ACCAACTCTGTTGGATGGGCCGTGATCACCGACGAGTACAAGGTGCCCAGCAAGAAATTCAAGGTGCT
GGGCAACACCGACCGGCACAGCATCAAGAAGAATCTGATCGGCGCCCTGCTGTTCGACTCTGGCGAAA
CAGCCGAAGCCACCAGACTGAAGAGAACCGCCAGGCGGAGATACACCCGGCGGAAGAACCGGATCTGC
TACCTGCAAGAGATCTTCAGCAACGAGATGGCCAAGGTGGACGACAGCTTCTTCCACAGACTGGAAGA
GTCCTTCCTGGTGGAAGAGGACAAGAAGCACGAGCGGCACCCCATCTTCGGCAACATCGTGGATGAGG
TGGCCTACCACGAGAAGTACCCCACCATCTACCACCTGAGAAAGAAACTGGTGGACAGCACCGACAAG
GCCGACCTGAGACTGATCTACCTGGCTCTGGCCCACATGATCAAGTTCCGGGGCCACTTTCTGATCGA
GGGCGATCTGAACCCCGACAACAGCGACGTGGACAAGCTGTTCATCCAGCTGGTGCAGACCTACAACC
AGCTGTTCGAGGAAAACCCCATCAACGCCTCTGGCGTGGACGCCAAGGCTATCCTGTCTGCCAGACTG
AGCAAGAGCAGAAGGCTGGAAAACCTGATCGCCCAGCTGCCTGGCGAGAAGAAGAATGGCCTGTTCGG
CAACCTGATTGCCCTGAGCCTGGGACTGACCCCTAACTTCAAGAGCAACTTCGACCTGGCCGAGGATG
CCAAACTGCAGCTGAGCAAGGACACCTACGACGACGACCTGGACAATCTGCTGGCCCAGATCGGCGAT
CAGTACGCCGACTTGTTTCTGGCCGCCAAGAACCTGTCCGACGCCATCCTGCTGAGCGATATCCTGAG
AGTGAACACCGAGATCACAAAGGCCCCTCTGAGCGCCTCTATGATCAAGAGATACGACGAGCACCACC
AGGATCTGACCCTGCTGAAGGCCCTCGTTAGACAGCAGCTGCCAGAGAAGTACAAAGAGATTTTCTTC
GATCAGTCCAAGAACGGCTACGCCGGCTACATTGATGGCGGAGCCAGCCAAGAGGAATTCTACAAGTT
CATCAAGCCCATCCTGGAAAAGATGGACGGCACCGAGGAACTGCTGGTCAAGCTGAACAGAGAGGACC
TGCTGCGGAAGCAGCGGACCTTCGACAATGGCTCTATCCCTCACCAGATCCACCTGGGAGAGCTGCAC
GCCATTCTGCGGAGACAAGAGGACTTTTACCCATTCCTGAAGGACAACCGGGAAAAGATCGAGAAGAT
CCTGACCTTCAGGATCCCCTACTACGTGGGACCACTGGCCAGAGGCAATAGCAGATTCGCCTGGATGA
CCAGAAAGAGCGAGGAAACCATCACACCCTGGAACTTCGAGGAAGTGGTGGACAAGGGCGCCAGCGCT
CAGTCCTTCATCGAGCGGATGACCAACTTCGATAAGAACCTGCCTAACGAGAAGGTGCTGCCCAAGCA
CTCCCTGCTGTATGAGTACTTCACCGTGTACAACGAGCTGACCAAAGTGAAATACGTGACCGAGGGAA
TGAGAAAGCCCGCCTTTCTGAGCGGCGAGCAGAAAAAGGCCATTGTGGATCTGCTGTTCAAGACCAAC
CGGAAAGTGACCGTGAAGCAGCTGAAAGAGGACTACTTCAAGAAAATCGAGTGCTTCGACAGCGTGGA
AATCAGCGGCGTGGAAGATCGGTTCAATGCCAGCCTGGGCACATACCACGACCTGCTGAAAATTATCA
AGGACAAGGACTTCCTGGACAACGAAGAGAACGAGGACATTCTCGAGGACATCGTGCTGACCCTGACA
CTGTTTGAGGACAGAGAGATGATCGAGGAACGGCTGAAAACATACGCCCACCTGTTCGACGACAAAGT
GATGAAGCAACTGAAGCGGAGGCGGTACACAGGCTGGGGCAGACTGTCTCGGAAGCTGATCAACGGCA
TCCGGGATAAGCAGTCCGGCAAGACAATCCTGGATTTCCTGAAGTCCGACGGCTTCGCCAACAGAAAC
TTCATGCAGCTGATCCACGACGACAGCCTGACCTTTAAAGAGGACATCCAGAAAGCCCAGGTGTCCGG
CCAAGGCGATTCTCTGCACGAGCACATTGCCAACCTGGCCGGATCTCCCGCCATTAAGAAGGGCATCC
TGCAGACAGTGAAGGTGGTGGACGAGCTTGTGAAAGTGATGGGCAGACACAAGCCCGAGAACATCGTG
ATCGAAATGGCCAGAGAGAACCAGACCACACAGAAGGGCCAGAAGAACAGCCGCGAGAGAATGAAGCG
GATCGAAGAGGGCATCAAAGAGCTGGGCAGCCAGATCCTGAAAGAACACCCCGTGGAAAACACCCAGC
TGCAGAACGAGAAGCTGTACCTGTACTACCTGCAGAATGGACGGGATATGTACGTGGACCAAGAGCTG
GACATCAACCGGCTGAGCGACTACGATGTGGACCATATCGTGCCCCAGAGCTTTCTGAAGGACGACTC
CATCGATAACAAGGTCCTGACCAGAAGCGACAAGAACCGGGGCAAGAGCGATAACGTGCCCTCCGAAG
AGGTGGTCAAGAAGATGAAGAACTACTGGCGACAGCTGCTGAACGCCAAGCTGATTACCCAGCGGAAG
TTCGATAACCTGACCAAGGCCGAGAGAGGCGGCCTGAGCGAACTTGATAAGGCCGGCTTCATTAAGCG
GCAGCTGGTGGAAACCCGGCAGATCACCAAACACGTGGCACAGATTCTGGACTCCCGGATGAACACTA
AGTACGACGAGAATGACAAGCTGATCCGGGAAGTGAAAGTCATCACCCTGAAGTCTAAGCTGGTGTCC
GATTTCCGGAAGGATTTCCAGTTCTACAAAGTGCGGGAAATCAACAACTACCATCACGCCCACGACGC
CTACCTGAATGCCGTTGTTGGAACAGCCCTGATCAAGAAGTATCCCAAGCTGGAAAGCGAGTTCGTGT
ACGGCGACTACAAGGTGTACGACGTGCGGAAGATGATCGCCAAGAGCGAACAAGAGATCGGCAAGGCT
ACCGCCAAGTACTTTTTCTACAGCAACATCATGAACTTTTTCAAGACAGAGATCACCCTGGCCAACGG
CGAGATCCGGAAAAGACCCCTGATCGAGACAAACGGCGAAACCGGGGAGATCGTGTGGGATAAGGGCA
GAGATTTTGCCACAGTGCGGAAAGTGCTGAGCATGCCCCAAGTGAATATCGTGAAGAAAACCGAGGTG
CAGACAGGCGGCTTCAGCAAAGAGTCTATCCTGCCTAAGCGGAACAGCGATAAGCTGATCGCCAGAAA
GAAGGACTGGGACCCTAAGAAGTACGGCGGCTTCGATAGCCCTACCGTGGCCTATTCTGTGCTGGTGG
TGGCCAAAGTGGAAAAGGGCAAGTCCAAAAAGCTCAAGAGCGTGAAAGAGCTGCTGGGGATCACCATC
ATGGAAAGAAGCAGCTTTGAGAAGAACCCGATCGACTTTCTGGAAGCCAAGGGCTACAAAGAAGTCAA
GAAGGACCTCATCATCAAGCTCCCCAAGTACAGCCTGTTCGAGCTGGAAAATGGCCGGAAGCGGATGC
TGGCCTCAGCAGGCGAACTGCAGAAAGGCAATGAACTGGCCCTGCCTAGCAAATACGTCAACTTCCTG
TACCTGGCCAGCCACTATGAGAAGCTGAAGGGCAGCCCCGAGGACAATGAGCAAAAGCAGCTGTTTGT
GGAACAGCACAAGCACTACCTGGACGAGATCATCGAGCAGATCAGCGAGTTCTCCAAGAGAGTGATCC
TGGCCGACGCTAACCTGGATAAGGTGCTGTCTGCCTATAACAAGCACCGGGACAAGCCTATCAGAGAG
CAGGCCGAGAATATCATCCACCTGTTTACCCTGACCAACCTGGGAGCCCCTGCCGCCTTCAAGTACTT
CGACACCACCATCGACCGGAAGAGGTACACCAGCACCAAAGAGGTGCTGGACGCCACACTGATCCACC
AGTCTATCACCGGCCTGTACGAAACCCGGATCGACCTGTCTCAGCTCGGCGGCGATTCTGGTGGTTCT
GGCGGAAGTGGCGGATCCACCAATCTGAGCGACATCATCGAAAAAGAGACAGGCAAGCAGCTCGTGAT
CCAAGAATCCATCCTGATGCTGCCTGAAGAGGTTGAGGAAGTGATCGGCAACAAGCCTGAGTCCGACA
TCCTGGTGCACACCGCCTACGATGAGAGCACCGATGAGAACGTCATGCTGCTGACAAGCGACGCCCCT
GAGTACAAGCCTTGGGCTCTCGTGATTCAGGACAGCAATGGGGAGAACAAGATCAAGATGCTGAGCGG
AGGTAGCGGAGGCAGTGGCGGAAGCACAAACCTGTCTGATATCATTGAAAAAGAAACCGGGAAGCAAC
TGGTCATTCAAGAGTCCATTCTCATGCTCCCGGAAGAAGTCGAGGAAGTCATTGGAAACAAACCCGAG
AGCGATATTCTGGTCCACACAGCCTATGACGAGTCTACAGACGAAAACGTGATGCTCCTGACCTCTGA
CGCTCCCGAGTATAAGCCCTGGGCACTTGTTATCCAGGACTCTAACGGGGAAAACAAAATCAAAATGT
TGTCCGGCGGCAGCAAGCGGACAGCCGATGGATCTGAGTTCGAGAGCCCCAAGAAGAAACGGAAGGTg
GAGtaa

[0074] By “base editing activity” is meant acting to chemically alter a base within a polynucleotide. In one embodiment, a first base is converted to a second base. In one embodiment, the base editing activity is cytidine deaminase activity, e.g., converting target C·G to T·A. In another embodiment, the base editing activity is adenosine or adenine deaminase activity, e.g., converting A·T to G·C. In another embodiment, the base editing activity is cytidine deaminase activity, e.g., converting target C·G to T·A and adenosine or adenine deaminase activity, e.g., converting A·T to G·C.

[0075] The term “base editor system” refers to a system for editing a nucleobase of a target nucleotide sequence. In various embodiments, the base editor (BE) system comprises (1) a polynucleotide programmable nucleotide binding domain, a deaminase domain and a cytidine deaminase domain for deaminating nucleobases in the target nucleotide sequence; and (2) one or more guide polynucleotides (e.g., guide RNA) in conjunction with the polynucleotide programmable nucleotide binding domain. In various embodiments, the base editor (BE) system comprises a nucleobase editor domains selected from an adenosine deaminase or a cytidine deaminase, and a domain having nucleic acid sequence specific binding activity. In some embodiments, the base editor system comprises (1) a base editor (BE) comprising a polynucleotide programmable DNA binding domain and a deaminase domain for deaminating one or more nucleobases in a target nucleotide sequence; and (2) one or more guide RNAs in conjunction with the polynucleotide programmable DNA binding domain. In some embodiments, the polynucleotide programmable nucleotide binding domain is a polynucleotide programmable DNA binding domain. In some embodiments, the base editor is a cytidine base editor (CBE). In some embodiments, the base editor is an adenine or adenosine base editor (ABE). In some embodiments, the base editor is an adenine or adenosine base editor (ABE) or a cytidine base editor (CBE).

[0076] The term “Cas9” or “Cas9 domain” refers to an RNA guided nuclease comprising a Cas9 protein, or a fragment thereof (e.g., a protein comprising an active, inactive, or partially active DNA cleavage domain of Cas9, and/or the gRNA binding domain of Cas9). A Cas9 nuclease is also referred to sometimes as a casnl nuclease or a CRISPR (clustered regularly interspaced short palindromic repeat) associated nuclease. An exemplary Cas9, is Streptococcus pyogenes Cas9 (spCas9), the amino acid sequence of which is provided below:

MDKKYSIGLDIGTNSVGWAVITDDYKVPSKKFKVLGNTDRHSIKKNLIGA
LLFGSGETAEATRLKRTARRRYTRRKNRICYLQEIFSNEMAKVDDSFFHR
LEESFLVEEDKKHERHPIFGNIVDEVAYHEKYPTIYHLRKKLADSTDKAD
LRLIYLALAHMIKFRGHFLIEGDLNPDNSDVDKLFIQLVQIYNQLFEENP
INASRVDAKAILSARLSKSRRLENLIAQLPGEKRNGLFGNLIALSLGLTP
NFKSNFDLAEDAKLQLSKDTYDDDLDNLLAQIGDQYADLFLAAKNLSDAI
LLSDILRVNSEITKAPLSASMIKRYDEHHQDLTLLKALVRQQLPEKYKEI
FFDQSKNGYAGYIDGGASQEEFYKFIKPILEKMDGTEELLVKLNREDLLR
KQRTFDNGSIPHQIHLGELHAILRRQEDFYPFLKDNREKIEKILTFRIPY
YVGPLARGNSRFAWMTRKSEETITPWNFEEVVDKGASAQSFIERMTNFDK
NLPNEKVLPKHSLLYEYFTVYNELTKVKYVTEGMRKPAFLSGEQKKAIVD
LLFKTNRKVTVKQLKEDYFKKIECFDSVEISGVEDRFNASLGAYHDLLKI
IKDKDFLDNEENEDILEDIVLTLTLFEDRGMIEERLKTYAHLFDDKVMKQ
LKRRRYTGWGRLSRKLINGIRDKQSGKTILDFLKSDGFANRNFMQLIHDD
SLTFKEDIQKAQVSGQGHSLHEQIANLAGSPAIKKGILQTVKIVDELVKV
MGHKPENIVIEMARENQTTQKGQKNSRERMKRIEEGIKELGSQILKEHPV
ENTQLQNEKLYLYYLQNGRDMYVDQELDINRLSDYDVDHIVPQSFIKDDS
IDNKVLTRSDKNRGKSDNVPSEEVVKKMKNYWRQLLNAKLITQRKFDNLT
KAERGGLSELDKAGFIKRQLVETRQITKHVAQILDSRMNTKYDENDKLIR
EVKVITLKSKLVSDFRKDFQFYKVREINNYHHAHDAYLNAVVGTALIKKY
PKLESEFVYGDYKVYDVRKMIAKSEQEIGKATAKYFFYSNIMNFFKTEIT
LANGEIRKRPLIETNGETGEIVWDKGRDFATVRKVLSMPQVNIVKKTEVQ
TGGFSKESILPKRNSDKLIARKKDWDPKKYGGFDSPTVAYSVLVVAKVEK
GKSKKLKSVKELLGITIMERSSFEKNPIDFLEAKGYKEVKKDLIIKLPKY
SLFELENGRKRMLASAGELQKGNELALPSKYVNFLYLASHYEKLKGSPED
NEQKQLFVEQHKHYLDEIIEQISEFSKRVILADANLDKVLSAYNKHRDKP
IREQAENIIHLFTLTNLGAPAAFKYFDTTIDRKRYTSTKEVLDATLIHQS
ITGLYETRIDLSQLGGD
(single underline: HNH domain; double underline:
RuvC domain)

[0077] The term “conservative amino acid substitution” or “conservative mutation” refers to the replacement of one amino acid by another amino acid with a common property. A functional way to define common properties between individual amino acids is to analyze the normalized frequencies of amino acid changes between corresponding proteins of homologous organisms (Schulz, G. E. and Schirmer, R. H., Principles of Protein Structure, Springer-Verlag, New York (1979)). According to such analyses, groups of amino acids can be defined where amino acids within a group exchange preferentially with each other, and therefore resemble each other most in their impact on the overall protein structure (Schulz, G. E. and Schirmer, R. H., supra). Non-limiting examples of conservative mutations include amino acid substitutions of amino acids, for example, lysine for arginine and vice versa such that a positive charge can be maintained; glutamic acid for aspartic acid and vice versa such that a negative charge can be maintained; serine for threonine such that a free —OH can be maintained; and glutamine for asparagine such that a free —NH₂ can be maintained.

[0078] The term “coding sequence” or “protein coding sequence” as used interchangeably herein refers to a segment of a polynucleotide that codes for a protein. The region or sequence is bounded nearer the 5′ end by a start codon and nearer the 3′ end with a stop codon. Stop codons useful with the base editors described herein include the following:
[0079] Glutamine CAG→TAG Stop codon
   [0080] CAA→TAA
[0081] Arginine CGA→TGA
[0082] Tryptophan TGG→TGA
   [0083] TGG→TAG
   [0084] TGG→TAA
      Coding sequences can also be referred to as open reading frames.

[0085] By “cytidine deaminase” is meant a polypeptide or fragment thereof capable of catalyzing a deamination reaction that converts an amino group to a carbonyl group. In one embodiment, the cytidine deaminase converts cytosine to uracil or 5-methylcytosine to thymine. PmCDA1, which is derived from Petromyzon marinus (Petromyzon marinus cytosine deaminase 1, “PmCDA1”), AID (Activation-induced cytidine deaminase; AICDA), which is derived from a mammal (e.g., human, swine, bovine, horse, monkey etc.), and APOBEC are exemplary cytidine deaminases.

[0086] The term “deaminase” or “deaminase domain,” as used herein, refers to a protein or enzyme that catalyzes a deamination reaction. In some embodiments, the deaminase or deaminase domain is a cytidine deaminase, catalyzing the hydrolytic deamination of cytidine or deoxycytidine to uridine or deoxyuridine, respectively. In some embodiments, the deaminase or deaminase domain is a cytosine deaminase, catalyzing the hydrolytic deamination of cytosine to uracil. In some embodiments, the deaminase is an adenosine deaminase, which catalyzes the hydrolytic deamination of adenine to hypoxanthine. In some embodiments, the deaminase is an adenosine deaminase, which catalyzes the hydrolytic deamination of adenosine or adenine (A) to inosine (I). In some embodiments, the deaminase or deaminase domain is an adenosine deaminase, catalyzing the hydrolytic deamination of adenosine or deoxyadenosine to inosine or deoxyinosine, respectively. In some embodiments, the adenosine deaminase catalyzes the hydrolytic deamination of adenosine in deoxyribonucleic acid (DNA). The adenosine deaminase (e.g., engineered adenosine deaminase, evolved adenosine deaminase) provided herein can be from any organism, such as a bacterium. In some embodiments, the adenosine deaminase is from a bacterium, such as E. coli, S. aureus, S. typhi, S. putrefaciens, H. influenzae, or C. crescentus. In some embodiments, the adenosine deaminase is a TadA deaminase. In some embodiments, the deaminase or deaminase domain is a variant of a naturally occurring deaminase from an organism, such as a human, chimpanzee, gorilla, monkey, cow, dog, rat, or mouse. In some embodiments, the deaminase or deaminase domain does not occur in nature. For example, in some embodiments, the deaminase or deaminase domain is at least 50%, at least 55%, at least 60%, at least 65%, at least 70%, at least 75% at least 80%, at least 85%, at least 90%, at least 91%, at least 92%, at least 93%, at least 94%, at least 95%, at least 96%, at least 97%, at least 98%, at least 99%, at least 99.1%, at least 99.2%, at least 99.3%, at least 99.4%, at least 99.5%, at least 99.6%, at least 99.7%, at least 99.8%, or at least 99.9% identical to a naturally occurring deaminase.

[0087] “Detect” refers to identifying the presence, absence or amount of the analyte to be detected. In one embodiment, a sequence alteration in a polynucleotide or polypeptide is detected. In another embodiment, the presence of indels is detected.

[0088] By “detectable label” is meant a composition that when linked to a molecule of interest renders the latter detectable, via spectroscopic, photochemical, biochemical, immunochemical, or chemical means. For example, useful labels include radioactive isotopes, magnetic beads, metallic beads, colloidal particles, fluorescent dyes, electron-dense reagents, enzymes (for example, as commonly used in an enzyme linked immunosorbent assay (ELISA), biotin, digoxigenin, or haptens.

[0089] By “disease” is meant any condition or disorder that damages or interferes with the normal function of a cell, tissue, or organ. Examples of diseases include HBV infection, as well as related diseases and disorders, including cirrhosis, hepatocellular carcinoma (HCC), and any other disease associated with or resulting from HBV infection.

[0090] By “effective amount” is meant the amount of a required to ameliorate the symptoms of a disease relative to an untreated patient. The effective amount of active compound(s) used to practice the present invention for therapeutic treatment of a disease varies depending upon the manner of administration, the age, body weight, and general health of the subject. Ultimately, the attending physician or veterinarian will decide the appropriate amount and dosage regimen. Such amount is referred to as an “effective” amount. In one embodiment, an effective amount is the amount of a base editor of the invention sufficient to introduce an alteration in an HBV genome in a cell (e.g., a cell in vitro or in vivo). In one embodiment, an effective amount is the amount of a base editor required to achieve a therapeutic effect (e.g., to reduce or control an HBV infection). Such therapeutic effect need not be sufficient to alter an HBV genome in all cells of a subject, tissue or organ, but only to alter an HBV genome in about 1%, 5%, 10%, 25%, 50%, 75% or more of the cells present in a subject, tissue or organ. In one embodiment, an effective amount is sufficient to ameliorate one or more symptoms of HBV.

[0091] In some embodiments, an effective amount of a fusion protein provided herein, e.g., of a nucleobase editor comprising a nCas9 domain and a deaminase domain (e.g., adenosine deaminase, cytidine deaminase) refers to the amount that is sufficient to induce editing of a target site specifically bound and edited by the nucleobase editors described herein. As will be appreciated by the skilled artisan, the effective amount of an agent, e.g., a fusion protein, may vary depending on various factors as, for example, on the desired biological response, e.g., on the specific genome or target site to be edited, on the cell or tissue being targeted, and/or on the agent being used.

[0092] In some embodiments, an effective amount of a fusion protein provided herein, e.g., of a fusion protein comprising a nCas9 domain and a deaminase domain may refer to the amount of the fusion protein that is sufficient to induce editing of a target site specifically bound and edited by the fusion protein. As will be appreciated by the skilled artisan, the effective amount of an agent, e.g., a fusion protein, may vary depending on various factors as, for example, on the desired biological response, e.g., on the specific genome or target site to be edited, on the cell or tissue being targeted, and/or on the agent being used.

[0093] By “fragment” is meant a portion of a polypeptide or nucleic acid molecule. This portion contains, preferably, at least 10%, 20%, 30%, 40%, 50%, 60%, 70%, 80%, or 90% of the entire length of the reference nucleic acid molecule or polypeptide. A fragment may contain 10, 20, 30, 40, 50, 60, 70, 80, 90, or 100, 200, 300, 400, 500, 600, 700, 800, 900, or 1000 nucleotides or amino acids.

[0094] By “guide RNA” or “gRNA” is meant a polynucleotide which is specific for a target sequence and can form a complex with a polynucleotide programmable nucleotide binding domain protein (e.g., Cas9 or Cpf1). In an embodiment, the guide polynucleotide is a guide RNA (gRNA). gRNAs can exist as a complex of two or more RNAs, or as a single RNA molecule. gRNAs that exist as a single RNA molecule may be referred to as single-guide RNAs (sgRNAs), although “gRNA” is used interchangeably to refer to guide RNAs that exist as either single molecules or as a complex of two or more molecules. Typically, gRNAs that exist as single RNA species comprise two domains: (1) a domain that shares homology to a target nucleic acid (e.g., and directs binding of a Cas9 complex to the target); and (2) a domain that binds a Cas9 protein. In some embodiments, domain (2) corresponds to a sequence known as a tracrRNA, and comprises a stem-loop structure. For example, in some embodiments, domain (2) is identical or homologous to a tracrRNA as provided in Jinek et al., Science 337:816-821(2012), the entire contents of which is incorporated herein by reference. Other examples of gRNAs (e.g., those including domain 2) can be found in US20160208288, entitled “Switchable Cas9 Nucleases and Uses Thereof,” and U.S. Pat. No. 9,737,604, entitled “Delivery System For Functional Nucleases,” the entire contents of each are hereby incorporated by reference in their entirety. In some embodiments, a gRNA comprises two or more of domains (1) and (2), and may be referred to as an “extended gRNA.” An extended gRNA will bind two or more Cas9 proteins and bind a target nucleic acid at two or more distinct regions, as described herein. The gRNA comprises a nucleotide sequence that complements a target site, which mediates binding of the nuclease/RNA complex to the target site, providing the sequence specificity of the nuclease:RNA complex.

[0095] By “HBV polymerase protein” is meant a polypeptide having at least about 95% identity to a wild-type HBV polymerase amino acid sequence or fragment thereof that functions in a hepatitis B viral infection. In one embodiment, the HBV polymerase is encoded by an HBV A, B, C, D, E, F, G, or H genotype. In one embodiment, the HBV polymerase amino acid sequence is provided at UniPro Accession No. Q8B5R0-1, which is reproduced below.

```
                10 20 30 40
MPLSYQHFRR LLLLDDEAGP LEEELPRLAD EGLNRRVAED
                50 60 70 80
LNLGNLNVSI PWTHKVGNFT GLYSSTVPVF NPHWKTPSFP
                90 100 110 120
NIHLHQDIIK KCEQFVGPLT VNEKRRLQLI MPARFYPKVT
              130 140 150 160
KYLPLDKGIK PYYPEHLVNH YFQTRHYLHT LWKAGILYKR
              170 180 190
ETTHSASFCG SPYSWEQDLQ HGAESFHQQS
```

Mutations in HBV polymerase include: E24G, L25F, P26F, R27C, V48A, V48I, S382F, V378I, V378A, V379I, V379A, L377F, D380G, D380N, F381P, R376G, A422T, F423P, A432V, M433V, P434S, D540G, A688V, D689G, A717T, E718K, P713S, P713L, or L719P.

[0096] Other exemplary HBV DNA polymerases include, for example, NCBI Accession No. AAB59972.1, which has the following sequence.

MPLSYQHFRKLLLLDDEAGPLEEELPRLADEGLNRRVAEDLNLGNLNVSI
PWTHKVGNFTGLYSSTVPVFNPHWKTPSFPNIHLHQDIIKKCEQFVGPLT
VNEKRRLQLIMPARFYPKVTKYLPLDKGIKPYYPEHLVNHYFQTRHYLHT
LWKAGILYKRETTHSASFCGSPYSWEQDLQHGAESFHQQSSGILSRPPVG
SSLQSKHSKSRLGLQSQQGHLARRQQGRSWSIRAGFHPTARRPFGVEPSG
SGHTTNFASKSASCLHQSPDRKAAYPAVSTFEKHSSSGHAVEFHNLSPNS
ARSQSERPVFPCWWLQFRSSKPCSDYCLSLIVNLLEDWGPCAEHGEHHIR
IPRTPSRVTGGVFLVDKNPHNTAESRLVVDFSQFSRGNYRVSWPKFAVPN
LQSLTNLLSSNLSWLSLDVSAAFYHLPLHPAAMPHLLVGSSGLSRYVARL
SSNSRILNHQHGTMPNLHDYCSRNLYVSLLLLYQTFGRKLHLYSHPIILG
FRKIPMGVGLSPFLLAQFTSAICSVVRRAFPHCLAFSYMDDVVLGAKSVQ
HLESLFTAVTNFLLSLGIHLNPNKTKRWGYSLNFMGYVIGSYGSLPQEHI
IQKIKECFRKLPINRPIDWKVCQRIVGLLGFAAPFTQCGYPALMPLYACI
QSKQAFTFSPTYKAFLCKQYLNLYPVARQRPGLCQVFADATPTGWGLVMG
HQRVRGTFSAPLPIHTAELLAACFARSRSGANIIGTDNSVVLSRKYTSYP
WLLGCAANWILRGTSFVYVPSALNPADDPSRGRLGLSRPLLRLPFRPTTG
RTSLYADSPSVPSHLPDRVHFASPLHVAWRPP

[0097] By “HBV polymerase gene” is meant a polynucleotide encoding an HBV polymerase.

[0098] By “Hepatitis B surface antigen (HBsAg) polypeptide” is meant an antigenic protein or fragment thereof having at least about 85% identity to NCBI Accession No. AAB59969.1, which functions in an HBV viral infection. An exemplary HBsAg amino acid sequence is provided below:

MENITSGFLGPLLVLQAGFFLLTRILTIPQSLDSTNTNTSLNFLGGTTVC
LGQNSQSPTSNHSPTSCPPTCPGYRTNMCLRRFIIFLFILLLCLIFLLVL
LDYQGMLPVCPLIPGSSTTSTGPCRTCMTTAQGTSMYPSCCCTKPSDGNC
TCIPIPSSWAFGKFLWEWASARFSWLSLLVPFVQWFVGLSPTVWLSVIWM
MWYWGPSLYSILSPFLPLLPIFFCLWVYI

[0099] By “HbsAg polynucleotide” is meant a polynucleotide encoding an HBsAg protein.

[0100] By “HBV X-protein” is meant a polypeptide or fragment thereof having at least about 85% identity to NCBI Accession No. AAB59970.1, which functions in an HBV viral infection. An exemplary amino acid sequence is provided below:

| | |
|---|---|
| 1 | maarlccqld pardvlclrp vgaescgrpf sgslgtlssp |
| | spsavptdhg ahlslrglpv |
| 61 | cafssagpca lrftsarrme ttvnahrmlp kvlhkrtlgl |
| | samsttdlea yfkdclfkdw |
| 121 | eelgeeirlk vfvlggcrhk lvcapapcnf ftsa |

[0101] By “core antigen precursor” is meant a polypeptide or fragment thereof having at least about 85% identity to NCBI Accession No. AAB59971.1, which functions in an HBV viral infection.

[0102] By “HBV core protein” is meant a polypeptide having at least about 95% identity to a wild-type HBV core protein amino acid sequence or fragment thereof. In an embodiment, the HBV core protein functions in a hepatitis B viral infection. In one embodiment, the HBV core protein is encoded by an HBV A, B, C, D, E, F, G, or H genotype. In one embodiment, the HBV core protein amino acid sequence is provided at NCBI GenBank Accession No. AXG50928.1, provided below:

| | |
|---|---|
| 1 | mdidpykefg asvellsflp sdffpsirdl ldtasalyre |
| | alespehcsp hhtalrqail |
| 61 | cwgelmnlat wvgsnledpa srelvvsyvn vnmglkirql |
| | lwfhiscltf gretvleylv |
| 121 | sfgvwirtpp ayrppnapil stlpettvvr rrgrsprrrt |
| | psprrrrsqs prrrrsgsre |
| 181 | sqc |

[0103] By “HBV X protein” is meant a polynucleotide encoding an HBV X-protein.

[0104] By “HBV X protein (genotype B)” is meant a polypeptide having at least about 95% identity to a wild-type HBV genotype B X protein amino acid sequence or fragment thereof. In an embodiment, the HBV X protein functions in a hepatitis B viral infection. In one embodiment, the HBV genotype B X protein amino acid sequence is provided at NCBI GenBank Accession No. BAQ95575.1, provided below:

| | |
|---|---|
| 1 | maarlccqld pardvlclrp vgaesrgrpl pgplgalppa |
| | sppvvpsdhg ahlslrglpv |
| 61 | cafssxgpca lrftsarrme ttvnahrnlp kvlhkrtlgl |
| | samsttdlea yfkdcvfxew |
| 121 | eelgeexrlk vfvlggcrhk lvcspapcnf ftsa |

[0105] By “HBV X protein (genotype C)” is meant a polypeptide having at least about 95% identity to a wild-type HBV genotype C X protein amino acid sequence or fragment thereof. In an embodiment, the HBV X protein functions in a hepatitis B viral infection. In one embodiment, the HBV genotype C X protein amino acid sequence is provided at NCBI GenBank Accession No. BAQ95563.1, provided below:

| | |
|---|---|
| 1 | maarvccqld pardvlclrp vgaesrgrpv sgpfgplpsp |
| | sssavpadyg ahlslrglpv |
| 61 | cafssagpca lrftsarrme ttvnahqvlp kllhkrtlgl |
| | samsttdlea yfkdclfkdw |
| 121 | eelgeeirlk vfvlggcrhk lvcspapcnf ftsa |

[0106] By “HBV S protein” is meant a polypeptide having at least about 95% identity to a wild-type HBV S protein amino acid sequence or fragment thereof. In an embodiment, the HBV S protein functions in a hepatitis B viral infection. In one embodiment, the HBV S protein is encoded by an HBV A, B, C, D, E, F, G, or H genotype. In one embodiment, the HBV S protein amino acid sequence is provided at NCBI GenBank Accession No. ABV02793.1, provided below:

| | |
|---|---|
| 1 | menttsgflg pllvlqagff lltrnitipq sldswwtsln |
| | flggaptcpg qnsqsptsnh |
| 61 | sptscppicp gyrwmclrrf iiflfilllc lifllvlldy |
| | qgmlpvcpll pgtsttstgp |
| 121 | cktctipaqg tsmfpsccct kpsdgnctci pipsswafar |
| | flwewasvrf swlsllvpfv |
| 181 | qwfvglsptv wlsviwmmwy wgpslynils pflpllpiff |
| | clwvyi |

[0107] The complete genome of Hepatitis B virus subtype ayw, complete genome, which includes polynucleotides encoding HBV polymerase, HBsAg protein, HBV X protein, and the core antigen precursor, is provided at GenBank Accession No. U95551.1, which is reproduced below:

| | |
|---|---|
| 1 | aattccacaa cctttcacca aactctgcaa gatcccagag tgagaggcct gtatttccct |
| 61 | gctggtggct ccagttcagg agcagtaaac cctgttccga ctactgcctc tcccttatcg |
| 121 | tcaatcttct cgaggattgg ggaccctgcg ctgaacatgg agaacatcac atcaggattc |
| 181 | ctaggacccc ttctcgtgtt acaggcgggg tttttcttgt tgacaagaat cctcacaata |
| 241 | ccgcagagtc tagactcgtg gtggacttct ctcaattttc tagggggaac taccgtgtgt |
| 301 | cttggccaaa attcgcagtc cccaacctcc aatcactcac caacctcctg tcctccaact |
| 361 | tgtcctggtt atcgctggat gtgtctgcgg cgttttatca tcttcctctt catcctgctg |
| 421 | ctatgcctca tcttcttgtt ggttcttctg gactatcaag gtatgttgcc cgtttgtcct |
| 481 | ctaattccag gatcctcaac caccagcacg ggaccatgcc gaacctgcat gactactgct |
| 541 | caaggaacct ctatgtatcc ctcctgttgc tgtaccaaac cttcggacgg aaattgcacc |
| 601 | tgtattccca tcccatcatc ctgggctttc ggaaaattcc tatgggagtg ggcctcagcc |
| 661 | cgtttctcct ggctcagttt actagtgcca tttgttcagt ggttcgtagg gctttccccc |
| 721 | actgtttggc tttcagttat atggatgatg tggtattggg ggccaagtct gtacagcatc |
| 781 | ttgagtccct ttttaccgct gttaccaatt ttcttttgtc tttgggtata catttaaacc |
| 841 | ctaacaaaac aaagagatgg ggttactctc tgaattttat gggttatgtc attggaagtt |
| 901 | atgggtcctt gccacaagaa cacatcatac aaaaaatcaa agaatgtttt agaaaacttc |
| 961 | ctattaacag gcctattgat tggaaagtat gtcaacgaat tgtgggtctt ttgggttttg |
| 1021 | ctgccccatt tacacaatgt ggttatcctg cgttaatgcc cttgtatgca tgtattcaat |
| 1081 | ctaagcaggc tttcactttc tcgccaactt acaaggcctt tctgtgtaaa caatacctga |
| 1141 | acctttaccc cgttgcccgg caacggccag gtctgtgcca agtgtttgct gacgcaaccc |
| 1201 | ccactggctg gggcttggtc atgggccatc agcgcgtgcg tggaaccttt tcggctcctc |
| 1261 | tgccgatcca tactgcggaa ctcctagccg cttgttttgc tcgcagcagg tctggagcaa |
| 1321 | acattatcgg gactgataac tctgttgtcc tctcccgcaa atatacatcg tatccatggc |
| 1381 | tgctaggctg tgctgccaac tggatcctgc gcgggacgtc ctttgtttac gtcccgtcgg |
| 1441 | cgctgaatcc tgcggacgac ccttctcggg gtcgcttggg actctctcgt ccccttctcc |
| 1501 | gtctgccgtt ccgaccgacc acggggcgca cctctcttta cgcggactcc ccgtctgtgc |
| 1561 | cttctcatct gccggaccgt gtgcacttcg cttcacctct gcacgtcgca tggagaccac |
| 1621 | cgtgaacgcc caccgaatgt tgcccaaggt cttacataag aggactcttg gactctctgc |
| 1681 | aatgtcaacg accgaccttg aggcatactt caaagactgt ttgtttaaag actgggagga |
| 1741 | gttgggggag gagattagat taaaggtctt tgtactagga ggctgtaggc ataaattggt |
| 1801 | ctgcgcacca gcaccatgca actttttcac ctctgcctaa tcatctcttg ttcatgtcct |
| 1861 | actgttcaag cctccaagct gtgccttggg tggctttggg gcatggacat cgacccttat |
| 1921 | aaagaatttg gagctactgt ggagttactc tcgtttttgc cttctgactt ctttccttca |
| 1981 | gtacgagatc ttctagatac cgcctcagct ctgtatcggg aagccttaga gtctcctgag |
| 2041 | cattgttcac ctcaccatac tgcactcagg caagcaattc tttgctgggg ggaactaatg |
| 2101 | actctagcta cctgggtggg tgttaatttg gaagatccag catctagaga cctagtagtc |
| 2161 | agttatgtca acactaatat gggcctaaag ttcaggcaac tcttgtggtt tcacatttct |
| 2221 | tgtctcactt ttggaagaga aaccgttata gagtatttgg tgtctttcgg agtgtggatt |
| 2281 | cgcactcctc cagcttatag accaccaaat gcccctatcc tatcaacact tccggaaact |
| 2341 | actgttgtta gacgacgagg caggtcccct agaagaagaa ctccctcgcc tcgcagacga |
| 2401 | aggtctcaat cgccgcgtcg cagaagatct caatctcggg aacctcaatg ttagtattcc |
| 2461 | ttggactcat aaggtgggga actttactgg tctttattct tctactgtac ctgtctttaa |
| 2521 | tcctcattgg aaaacaccat cttttcctaa tatacattta caccaagaca ttatcaaaaa |
| 2581 | atgtgaacag tttgtaggcc cacttacagt taatgagaaa agaagattgc aattgattat |
| 2641 | gcctgctagg ttttatccaa aggttaccaa atatttacca ttggataagg gtattaaacc |
| 2701 | ttattatcca gaacatctag ttaatcatta cttccaaact agacactatt tacacactct |
| 2761 | atggaaggcg ggtatattat ataagagaga aacaacacat agcgcctcat tttgtgggtc |
| 2821 | accatattct tgggaacaag atctacagca tggggcagaa tctttccacc agcaatcctc |
| 2881 | tgggattctt tcccgaccac cagttggatc cagccttcag agcaaacaca gcaaatccag |
| 2941 | attgggactt caatcccaac aaggacacct ggccagacgc caacaaggta ggagctggag |
| 3001 | cattcgggct gggtttcacc ccaccgcacg gaggcctttt ggggtggagc cctcaggctc |
| 3061 | agggcatact acaaactttg ccagcaaatc cgcctcctgc ctccaccaat cgccagacag |
| 3121 | gaaggcagcc taccccgctg tctccacctt tgagaaacac tcatcctcag gccatgcagt |
| 3181 | gg |

[0108] By “heterodimer” is meant a fusion protein comprising two domains, such as a wild type TadA domain and a variant of TadA domain (e.g., TadA*8) or two variant TadA domains (e.g., TadA*7.10 and TadA*8 or two TadA*8 domains).

[0109] “Hybridization” means hydrogen bonding, which may be Watson-Crick, Hoogsteen or reversed Hoogsteen hydrogen bonding, between complementary nucleobases. For example, adenine and thymine are complementary nucleobases that pair through the formation of hydrogen bonds.

[0110] The terms “isolated,” “purified,” or “biologically pure” refer to material that is free to varying degrees from components which normally accompany it as found in its native state. “Isolate” denotes a degree of separation from original source or surroundings. “Purify” denotes a degree of separation that is higher than isolation. A “purified” or “biologically pure” protein is sufficiently free of other materials such that any impurities do not materially affect the biological properties of the protein or cause other adverse consequences. That is, a nucleic acid or peptide of this invention is purified if it is substantially free of cellular material, viral material, or culture medium when produced by recombinant DNA techniques, or chemical precursors or other chemicals when chemically synthesized. Purity and homogeneity are typically determined using analytical chemistry techniques, for example, polyacrylamide gel electrophoresis or high-performance liquid chromatography. The term “purified” can denote that a nucleic acid or protein gives rise to essentially one band in an electrophoretic gel. For a protein that can be subjected to modifications, for example, phosphorylation or glycosylation, different modifications may give rise to different isolated proteins, which can be separately purified.

[0111] By “isolated polynucleotide” is meant a nucleic acid (e.g., a DNA) that is free of the genes which, in the naturally-occurring genome of the organism from which the nucleic acid molecule of the invention is derived, flank the gene. The term therefore includes, for example, a recombinant DNA that is incorporated into a vector; into an autonomously replicating plasmid or virus; or into the genomic DNA of a prokaryote or eukaryote; or that exists as a separate molecule (for example, a cDNA or a genomic or cDNA fragment produced by PCR or restriction endonuclease digestion) independent of other sequences. In addition, the term includes an RNA molecule that is transcribed from a DNA molecule, as well as a recombinant DNA that is part of a hybrid gene encoding additional polypeptide sequence.

[0112] By “increases” is meant a positive alteration of at least 10%, 25%, 50%, 75%, or 100%.

[0113] The terms “inhibitor of base repair”, “base repair inhibitor”, “IBR” or their grammatical equivalents refer to a protein that is capable in inhibiting the activity of a nucleic acid repair enzyme, for example a base excision repair enzyme. In some embodiments, the IBR is an inhibitor of inosine base excision repair. Exemplary inhibitors of base repair include inhibitors of APE1, Endo III, Endo IV, Endo V, Endo VIII, Fpg, hOGGI, hNEIL1, T7 Endol, T4PDG, UDG, hSMUG1, and hAAG. In some embodiments, the base repair inhibitor is an inhibitor of Endo V or hAAG. In some embodiments, the IBR is an inhibitor of Endo V or hAAG. In some embodiments, the IBR is a catalytically inactive EndoV or a catalytically inactive hAAG. In some embodiments, the base repair inhibitor is a catalytically inactive EndoV or a catalytically inactive hAAG. In some embodiments, the base repair inhibitor is uracil glycosylase inhibitor (UGI). UGI refers to a protein that is capable of inhibiting a uracil-DNA glycosylase base-excision repair enzyme. In some embodiments, a UGI domain comprises a wild-type UGI or a fragment of a wild-type UGI. In some embodiments, the UGI proteins provided herein include fragments of UGI and proteins homologous to a UGI or a UGI fragment. In some embodiments, the base repair inhibitor is an inhibitor of inosine base excision repair. In some embodiments, the base repair inhibitor is a “catalytically inactive inosine specific nuclease” or “dead inosine specific nuclease.” Without wishing to be bound by any particular theory, catalytically inactive inosine glycosylases (e.g., alkyl adenine glycosylase (AAG)) can bind inosine, but cannot create an abasic site or remove the inosine, thereby sterically blocking the newly formed inosine moiety from DNA damage/repair mechanisms. In some embodiments, the catalytically inactive inosine specific nuclease can be capable of binding an inosine in a nucleic acid but does not cleave the nucleic acid. Non-limiting exemplary catalytically inactive inosine specific nucleases include catalytically inactive alkyl adenosine glycosylase (AAG nuclease), for example, from a human, and catalytically inactive endonuclease V (EndoV nuclease), for example, from E. coli. In some embodiments, the catalytically inactive AAG nuclease comprises an E125Q mutation or a corresponding mutation in another AAG nuclease.

[0114] An “intein” is a fragment of a protein that is able to excise itself and join the remaining fragments (the exteins) with a peptide bond in a process known as protein splicing. Inteins are also referred to as “protein introns.” The process of an intein excising itself and joining the remaining portions of the protein is herein termed “protein splicing” or “intein-mediated protein splicing.” In some embodiments, an intein of a precursor protein (an intein containing protein prior to intein-mediated protein splicing) comes from two genes. Such intein is referred to herein as a split intein (e.g., split intein-N and split intein-C). For example, in cyanobacteria, DnaE, the catalytic subunit a of DNA polymerase III, is encoded by two separate genes, dnaE-n and dnaE-c. The intein encoded by the dnaE-n gene may be herein referred as “intein-N.” The intein encoded by the dnaE-c gene may be herein referred as “intein-C.”

[0115] Other intein systems may also be used. For example, a synthetic intein based on the dnaE intein, the Cfa-N (e.g., split intein-N) and Cfa-C (e.g., split intein-C) intein pair, has been described (e.g., in Stevens et al., J Am Chem Soc. 2016 Feb. 24; 138(7):2162-5, incorporated herein by reference). Non-limiting examples of intein pairs that may be used in accordance with the present disclosure include: Cfa DnaE intein, Ssp GyrB intein, Ssp DnaX intein, Ter DnaE3 intein, Ter ThyX intein, Rma DnaB intein and Cne Prp8 intein (e.g., as described in U.S. Pat. No. 8,394,604, incorporated herein by reference.

Exemplary nucleotide and amino acid sequences of inteins are provided.

DnaE Intein-N DNA:
TGCCTGTCATACGAAACCGAGATACTGACAGTAGAATATGGCCTTCTGCC
AATCGGGAAGATTGTGGAGAAACGGATAGAATGCACAGTTTACTCTGTCG
ATAACAATGGTAACATTTATACTCAGCCAGTTGCCCAGTGGCACGACCGG
GGAGAGCAGGAAGTATTCGAATACTGTCTGGAGGATGGAAGTCTCATTAG
GGCCACTAAGGACCACAAATTTATGACAGTCGATGGCCAGATGCTGCCTA
TAGACGAAATCTTTGAGCGAGAGTTGGACCTCATGCGAGTTGACAACCTT
CCTAT
DnaE Intein-N Protein:
CLSYETEILTVEYGLLPIGKIVEKRIECTVYSVDNNGNIYTQPVAQWHDR
GEQEVFEYCLEDGSLIRATKDHKFMTVDGQMLPIDEIFERELDLMRVDNL
PN
DnaE Intein-C DNA:
ATGATCAAGATAGCTACAAGGAAGTATCTTGGCAAACAAAACGTTTATGA
TATTGGAGTCGAAAGAGATCACAACTTTGCTCTGAAGAACGGATTCATAG
CTTCTAAT
Intein-C:
MIKIATRKYLGKQNVYDIGVERDHNFALKNGFIASN
Cfa-N DNA:
TGCCTGTCTTATGATACCGAGATACTTACCGTTGAATATGGCTTCTTGCC
TATTGGAAAGATTGTCGAAGAGAGAATTGAATGCACAGTATATACTGTAG
ACAAGAATGGTTTCGTTTACACACAGCCCATTGCTCAATGGCACAATCGC
GGCGAACAAGAAGTATTTGAGTACTGTCTCGAGGATGGAAGCATCATACG
AGCAACTAAAGATCATAAATTCATGACCACTGACGGGCAGATGTTGCCAA
TAGATGAGATATTCGAGCGGGGCTTGGATCTCAAACAAGTGGATGGATTG
CCA
Cfa-N Protein:
CLSYDTEILTVEYGFLPIGKIVEERIECTVYTVDKNGFVYTQPIAQWHNR
GEQEVFEYCLEDGSIIRATKDHKFMTTDGQMLPIDEIFERGLDLKQVDGL
P
Cfa-C DNA:
ATGAAGAGGACTGCCGATGGATCAGAGTTTGAATCTCCCAAGAAGAAGAG
GAAAGTAAAGATAATATCTCGAAAAAGTCTTGGTACCCAAAATGTCTATG
ATATTGGAGTGGAGAAAGATCACAACTTCCTTCTCAAGAACGGTCTCGTA
GCCAGCAAC
Cfa-C Protein:
MKRTADGSEFESPKKKRKVKIISRKSLGTQNVYDIGVEKDHNFLLKNGLV
ASN

[0116] Intein-N and intein-C may be fused to the N-terminal portion of the split Cas9 and the C-terminal portion of the split Cas9, respectively, for the joining of the N-terminal portion of the split Cas9 and the C-terminal portion of the split Cas9. For example, in some embodiments, an intein-N is fused to the C-terminus of the N-terminal portion of the split Cas9, i.e., to form a structure of N—[N-terminal portion of the split Cas9]-[intein-N]—C. In some embodiments, an intein-C is fused to the N-terminus of the C-terminal portion of the split Cas9, i.e., to form a structure of N-[intein-C]—[C-terminal portion of the split Cas9]-C. The mechanism of intein-mediated protein splicing for joining the proteins the inteins are fused to (e.g., split Cas9) is known in the art, e.g., as described in Shah et al., Chem Sci. 2014; 5(1):446-461, incorporated herein by reference. Methods for designing and using inteins are known in the art and described, for example by WO2014004336, WO2017132580, US20150344549, and US20180127780, each of which is incorporated herein by reference in their entirety.

[0117] By an “isolated polypeptide” is meant a polypeptide of the invention that has been separated from components that naturally accompany it. Typically, the polypeptide is isolated when it is at least 60%, by weight, free from the proteins and naturally-occurring organic molecules with which it is naturally associated. Preferably, the preparation is at least 75%, more preferably at least 90%, and most preferably at least 99%, by weight, a polypeptide of the invention. An isolated polypeptide of the invention may be obtained, for example, by extraction from a natural source, by expression of a recombinant nucleic acid encoding such a polypeptide; or by chemically synthesizing the protein. Purity can be measured by any appropriate method, for example, column chromatography, polyacrylamide gel electrophoresis, or by HPLC analysis.

[0118] The term “linker”, as used herein, can refer to a covalent linker (e.g., covalent bond), a non-covalent linker, a chemical group, or a molecule linking two molecules or moieties, e.g., two components of a protein complex or a ribonucleocomplex, or two domains of a fusion protein, such as, for example, a polynucleotide programmable DNA binding domain (e.g., dCas9) and a deaminase domain ((e.g., an adenosine deaminase, a cytidine deaminase, or an adenosine deaminase and a cytidine deaminase). A linker can join different components of, or different portions of components of, a base editor system. For example, in some embodiments, a linker can join a guide polynucleotide binding domain of a polynucleotide programmable nucleotide binding domain and a catalytic domain of a deaminase. In some embodiments, a linker can join a CRISPR polypeptide and a deaminase. In some embodiments, a linker can join a Cas9 and a deaminase. In some embodiments, a linker can join a dCas9 and a deaminase. In some embodiments, a linker can join a nCas9 and a deaminase. In some embodiments, a linker can join a guide polynucleotide and a deaminase. In some embodiments, a linker can join a deaminating component and a polynucleotide programmable nucleotide binding component of a base editor system. In some embodiments, a linker can join a RNA-binding portion of a deaminating component and a polynucleotide programmable nucleotide binding component of a base editor system. In some embodiments, a linker can join a RNA-binding portion of a deaminating component and a RNA-binding portion of a polynucleotide programmable nucleotide binding component of a base editor system. A linker can be positioned between, or flanked by, two groups, molecules, or other moieties and connected to each one via a covalent bond or non-covalent interaction, thus connecting the two. In some embodiments, the linker can be an organic molecule, group, polymer, or chemical moiety. In some embodiments, the linker can be a polynucleotide. In some embodiments, the linker can be a DNA linker. In some embodiments, the linker can be a RNA linker. In some embodiments, a linker can comprise an aptamer capable of binding to a ligand. In some embodiments, the ligand may be carbohydrate, a peptide, a protein, or a nucleic acid. In some embodiments, the linker may comprise an aptamer may be derived from a riboswitch. The riboswitch from which the aptamer is derived may be selected from a theophylline riboswitch, a thiamine pyrophosphate (TPP) riboswitch, an adenosine cobalamin (AdoCbl) riboswitch, an S-adenosyl methionine (SAM) riboswitch, an SAH riboswitch, a flavin mononucleotide (FMN) riboswitch, a tetrahydrofolate riboswitch, a lysine riboswitch, a glycine riboswitch, a purine riboswitch, a GlmS riboswitch, or a pre-queosine1 (PreQ1) riboswitch. In some embodiments, a linker may comprise an aptamer bound to a polypeptide or a protein domain, such as a polypeptide ligand. In some embodiments, the polypeptide ligand may be a K Homology (KH) domain, a MS2 coat protein domain, a PP7 coat protein domain, a SfMu Com coat protein domain, a sterile alpha motif, a telomerase Ku binding motif and Ku protein, a telomerase Sm7 binding motif and Sm7 protein, or a RNA recognition motif. In some embodiments, the polypeptide ligand may be a portion of a base editor system component. For example, a nucleobase editing component may comprise a deaminase domain and a RNA recognition motif.

[0119] In some embodiments, the linker can be an amino acid or a plurality of amino acids (e.g., a peptide or protein). In some embodiments, the linker can be about 5-100 amino acids in length, for example, about 5, 6, 7, 8, 9, 10, 11, 12, 13, 14, 15, 16, 17, 18, 19, 20, 20-30, 30-40, 40-50, 50-60, 60-70, 70-80, 80-90, or 90-100 amino acids in length. In some embodiments, the linker can be about 100-150, 150-200, 200-250, 250-300, 300-350, 350-400, 400-450, or 450-500 amino acids in length. Longer or shorter linkers can be also contemplated.

[0120] In some embodiments, a linker joins a gRNA binding domain of an RNA-programmable nuclease, including a Cas9 nuclease domain, and the catalytic domain of a nucleic-acid editing protein (e.g., cytidine or adenosine deaminase). In some embodiments, a linker joins a dCas9 and a nucleic-acid editing protein. For example, the linker is positioned between, or flanked by, two groups, molecules, or other moieties and connected to each one via a covalent bond, thus connecting the two. In some embodiments, the linker is an amino acid or a plurality of amino acids (e.g., a peptide or protein). In some embodiments, the linker is an organic molecule, group, polymer, or chemical moiety. In some embodiments, the linker is 5-200 amino acids in length, for example, 5, 6, 7, 8, 9, 10, 11, 12, 13, 14, 15, 16, 17, 18, 19, 20, 25, 35, 45, 50, 55, 60, 60, 65, 70, 70, 75, 80, 85, 90, 90, 95, 100, 101, 102, 103, 104, 105, 110, 120, 130, 140, 150, 160, 175, 180, 190, or 200 amino acids in length.

[0121] In some embodiments, the domains of a base editor are fused via a linker that comprises the amino acid sequence of SGGSSGSETPGTSESATPESSGGS, SGGSSGGSSGSETPGTSESATPESSGGSSGGS, or GGSGGSPGSPAGSPTSTEEGTSESATPESGPGTSTEPSEGSAPGSPAGSPTSTEEGTSTE PSEGSAPGTSTEPSEGSAPGTSESATPESGPGSEPATSGGSGGS. In some embodiments, domains of the nucleobase editor are fused via a linker comprising the amino acid sequence SGSETPGTSESATPES, which may also be referred to as the XTEN linker. In some embodiments, the linker is 24 amino acids in length. In some embodiments, the linker comprises the amino acid sequence SGGSSGGSSGSETPGTSESATPES. In some embodiments, the linker is 40 amino acids in length. In some embodiments, the linker comprises the amino acid sequence SGGSSGGSSGSETPGTSESATPESSGGSSGGSSGGSSGGS. In some embodiments, the linker is 64 amino acids in length. In some embodiments, the linker comprises the amino acid sequence SGGSSGGSSGSETPGTSESATPESSGGSSGGSSGGSSGGSSGSETPGTSESATPESSGGS SGGS. In some embodiments, the linker is 92 amino acids in length. In some embodiments, the linker comprises the amino acid sequence

PGSPAGSPTSTEEGTSESATPESGPGTSTEPSEGSAPGSPAGSPTSTEEG
TSTEPSEGSAPGTSTEPSEGSAPGTSESATPESGPGSEPATS.

[0122] By “marker” is meant any protein or polynucleotide having an alteration in expression level or activity that is associated with a disease or disorder.

[0123] The term “mutation,” as used herein, refers to a substitution of a residue within a sequence, e.g., a nucleic acid or amino acid sequence, with another residue, or a deletion or insertion of one or more residues within a sequence. Mutations are typically described herein by identifying the original residue followed by the position of the residue within the sequence and by the identity of the newly substituted residue. Various methods for making the amino acid substitutions (mutations) provided herein are well known in the art, and are provided by, for example, Green and Sambrook, Molecular Cloning: A Laboratory Manual (4^{th} ed., Cold Spring Harbor Laboratory Press, Cold Spring Harbor, N.Y. (2012)). In some embodiments, the presently disclosed base editors can efficiently generate an “intended mutation”, such as a point mutation, in a nucleic acid (e.g., a nucleic acid within a genome of a subject) without generating a significant number of unintended mutations, such as unintended point mutations. In some embodiments, an intended mutation is a mutation that is generated by a specific base editor (e.g., cytidine base editor or adenosine base editor) bound to a guide polynucleotide (e.g., gRNA), specifically designed to generate the intended mutation.

[0124] In general, mutations made or identified in a sequence (e.g., an amino acid sequence as described herein) are numbered in relation to a reference (or wild type) sequence, i.e., a sequence that does not contain the mutations. The skilled practitioner in the art would readily understand how to determine the position of mutations in amino acid and nucleic acid sequences relative to a reference sequence.

[0125] The term “non-conservative mutations” involve amino acid substitutions between different groups, for example, lysine for tryptophan, or phenylalanine for serine, etc. In this case, it is preferable for the non-conservative amino acid substitution to not interfere with, or inhibit the biological activity of, the functional variant. The non-conservative amino acid substitution can enhance the biological activity of the functional variant, such that the biological activity of the functional variant is increased as compared to the wild-type protein.

[0126] In some embodiments, the presently disclosed base editors can efficiently generate an “intended mutation”, such as a point mutation, in a nucleic acid (e.g., a nucleic acid within a genome of a subject) without generating a significant number of unintended mutations, such as unintended point mutations. In some embodiments, an intended mutation is a mutation that is generated by a specific base editor (e.g., cytidine base editor or adenosine base editor) bound to a guide polynucleotide (e.g., gRNA), specifically designed to generate the intended mutation.

[0127] In general, mutations made or identified in a sequence (e.g., an amino acid sequence as described herein) are numbered in relation to a reference (or wild type) sequence, i.e., a sequence that does not contain the mutations. The skilled practitioner in the art would readily understand how to determine the position of mutations in amino acid and nucleic acid sequences relative to a reference sequence.

[0128] The term “non-conservative mutations” involve amino acid substitutions between different groups, for example, lysine for tryptophan, or phenylalanine for serine, etc. In this case, it is preferable for the non-conservative amino acid substitution to not interfere with, or inhibit the biological activity of, the functional variant. The non-conservative amino acid substitution can enhance the biological activity of the functional variant, such that the biological activity of the functional variant is increased as compared to the wild-type protein.

[0129] The term “nuclear localization sequence,” “nuclear localization signal,” or “NLS” refers to an amino acid sequence that promotes import of a protein into the cell nucleus. Nuclear localization sequences are known in the art and described, for example, in Plank et al., International PCT application, PCT/EP2000/011690, filed Nov. 23, 2000, published as WO/2001/038547 on May 31, 2001, the contents of which are incorporated herein by reference for their disclosure of exemplary nuclear localization sequences. In other embodiments, the NLS is an optimized NLS described, for example, by Koblan et al., Nature Biotech. 2018 doi:10.1038/nbt. 4172. In some embodiments, an NLS comprises the amino acid sequence KRTADGSEFESPKKKRKV, KRPAATKKAGQAKKKK, KKTELQTTNAENKTKKL, KRGINDRNFWRGENGRKTR, RKSGKIAAIVVKRPRK, PKKKRKV, or MDSLLMNRRKFLYQFKNVRWAKGRRETYLC.

[0130] The term “nucleobase,” “nitrogenous base,” or “base,” used interchangeably herein, refers to a nitrogen-containing biological compound that forms a nucleoside, which in turn is a component of a nucleotide. The ability of nucleobases to form base pairs and to stack one upon another leads directly to long-chain helical structures such as ribonucleic acid (RNA) and deoxyribonucleic acid (DNA). Five nucleobases—adenine (A), cytosine (C), guanine (G), thymine (T), and uracil (U)—are called primary or canonical. Adenine and guanine are derived from purine, and cytosine, uracil, and thymine are derived from pyrimidine. DNA and RNA can also contain other (non-primary) bases that are modified. Non-limiting exemplary modified nucleobases can include hypoxanthine, xanthine, 7-methylguanine, 5,6-dihydrouracil, 5-methylcytosine (m5C), and 5-hydromethylcytosine. Hypoxanthine and xanthine can be created through mutagen presence, both of them through deamination (replacement of the amine group with a carbonyl group). Hypoxanthine can be modified from adenine. Xanthine can be modified from guanine. Uracil can result from deamination of cytosine. A “nucleoside” consists of a nucleobase and a five carbon sugar (either ribose or deoxyribose). Examples of a nucleoside include adenosine, guanosine, uridine, cytidine, 5-methyluridine (m5U), deoxyadenosine, deoxyguanosine, thymidine, deoxyuridine, and deoxycytidine. Examples of a nucleoside with a modified nucleobase includes inosine (I), xanthosine (X), 7-methylguanosine (m7G), dihydrouridine (D), 5-methylcytidine (m5C), and pseudouridine (Ψ). A “nucleotide” consists of a nucleobase, a five carbon sugar (either ribose or deoxyribose), and at least one phosphate group.

[0131] The terms “nucleic acid” and “nucleic acid molecule,” as used herein, refer to a compound comprising a nucleobase and an acidic moiety, e.g., a nucleoside, a nucleotide, or a polymer of nucleotides. Typically, polymeric nucleic acids, e.g., nucleic acid molecules comprising three or more nucleotides are linear molecules, in which adjacent nucleotides are linked to each other via a phosphodiester linkage. In some embodiments, “nucleic acid” refers to individual nucleic acid residues (e.g. nucleotides and/or nucleosides). In some embodiments, “nucleic acid” refers to an oligonucleotide chain comprising three or more individual nucleotide residues. As used herein, the terms “oligonucleotide” and “polynucleotide” can be used interchangeably to refer to a polymer of nucleotides (e.g., a string of at least three nucleotides). In some embodiments, “nucleic acid” encompasses RNA as well as single and/or double-stranded DNA. Nucleic acids may be naturally occurring, for example, in the context of a genome, a transcript, an mRNA, tRNA, rRNA, siRNA, snRNA, a plasmid, cosmid, chromosome, chromatid, or other naturally occurring nucleic acid molecule. On the other hand, a nucleic acid molecule may be a non-naturally occurring molecule, e.g., a recombinant DNA or RNA, an artificial chromosome, an engineered genome, or fragment thereof, or a synthetic DNA, RNA, DNA/RNA hybrid, or including non-naturally occurring nucleotides or nucleosides. Furthermore, the terms “nucleic acid,” “DNA,” “RNA,” and/or similar terms include nucleic acid analogs, e.g., analogs having other than a phosphodiester backbone. Nucleic acids can be purified from natural sources, produced using recombinant expression systems and optionally purified, chemically synthesized, etc. Where appropriate, e.g., in the case of chemically synthesized molecules, nucleic acids can comprise nucleoside analogs such as analogs having chemically modified bases or sugars, and backbone modifications. A nucleic acid sequence is presented in the 5′ to 3′ direction unless otherwise indicated. In some embodiments, a nucleic acid is or comprises natural nucleosides (e.g. adenosine, thymidine, guanosine, cytidine, uridine, deoxyadenosine, deoxythymidine, deoxyguanosine, and deoxycytidine); nucleoside analogs (e.g., 2-aminoadenosine, 2-thiothymidine, inosine, pyrrolo-pyrimidine, 3-methyl adenosine, 5-methylcytidine, 2-aminoadenosine, C5-bromouridine, C5-fluorouridine, C5-iodouridine, C5-propynyl-uridine, C5-propynyl-cytidine, C5-methylcytidine, 2-aminoadenosine, 7-deazaadenosine, 7-deazaguanosine, 8-oxoadenosine, 8-oxoguanosine, 0(6)-methylguanine, and 2-thiocytidine); chemically modified bases; biologically modified bases (e.g., methylated bases); intercalated bases; modified sugars (2′—e.g., fluororibose, ribose, 2′-deoxyribose, arabinose, and hexose); and/or modified phosphate groups (e.g., phosphorothioates and 5′-N-phosphoramidite linkages).

[0132] The term “nucleic acid programmable DNA binding protein” or “napDNAbp” may be used interchangeably with “polynucleotide programmable nucleotide binding domain” to refer to a protein that associates with a nucleic acid (e.g., DNA or RNA), such as a guide nucleic acid or guide polynucleotide (e.g., gRNA), that guides the napDNAbp to a specific nucleic acid sequence. In some embodiments, the polynucleotide programmable nucleotide binding domain is a polynucleotide programmable DNA binding domain. In some embodiments, the polynucleotide programmable nucleotide binding domain is a polynucleotide programmable RNA binding domain. In some embodiments, the polynucleotide programmable nucleotide binding domain is a Cas9 protein. A Cas9 protein can associate with a guide RNA that guides the Cas9 protein to a specific DNA sequence that is complementary to the guide RNA. In some embodiments, the napDNAbp is a Cas9 domain, for example a nuclease active Cas9, a Cas9 nickase (nCas9), or a nuclease inactive Cas9 (dCas9). Non-limiting examples of nucleic acid programmable DNA binding proteins include, Cas9 (e.g., dCas9 and nCas9), Cas12a/Cpf1, Cas12b/C2c1, Cas12c/C2c3, Cas12d/CasY, Cas12e/CasX, Cas12g, Cas12h, and Cas12i. Non-limiting examples of Cas enzymes include Cas1, Cas1B, Cas2, Cas3, Cas4, Cas5, Cas5d, Cas5t, Cas5h, Cas5a, Cas6, Cas7, Cas8, Cas8a, Cas8b, Cas8c, Cas9 (also known as Csn1 or Csx12), Cas10, Cas10d, Cas12a/Cpf1, Cas12b/C2c1, Cas12c/C2c3, Cas12d/CasY, Cas12e/CasX, Cas12g, Cas12h, Cas12i, Csy1, Csy2, Csy3, Csy4, Cse1, Cse2, Cse3, Cse4, Cse5e, Csc1, Csc2, Csa5, Csn1, Csn2, Csm1, Csm2, Csm3, Csm4, Csm5, Csm6, Cmr1, Cmr3, Cmr4, Cmr5, Cmr6, Csb1, Csb2, Csb3, Csx17, Csx14, Csx10, Csx16, CsaX, Csx3, Csx1, Csx1S, Csx11, Csf1, Csf2, CsO, Csf4, Csd1, Csd2, Cst1, Cst2, Csh1, Csh2, Csa1, Csa2, Csa3, Csa4, Csa5, Type II Cas effector proteins, Type V Cas effector proteins, Type VI Cas effector proteins, CARF, DinG, homologues thereof, or modified or engineered versions thereof. Other nucleic acid programmable DNA binding proteins are also within the scope of this disclosure, although they may not be specifically listed in this disclosure. See, e.g., Makarova et al. “Classification and Nomenclature of CRISPR-Cas Systems: Where from Here?” CRISPR J. 2018 October; 1:325-336. doi: 10.1089/crispr.2018.0033; Yan et al., “Functionally diverse type V CRISPR-Cas systems” Science. 2019 Jan. 4; 363(6422):88-91. doi: 10.1126/science.aav7271, the entire contents of each are hereby incorporated by reference.

[0133] The terms “nucleobase editing domain” or “nucleobase editing protein,” as used herein, refers to a protein or enzyme that can catalyze a nucleobase modification in RNA or DNA, such as cytosine (or cytidine) to uracil (or uridine) or thymine (or thymidine), and adenine (or adenosine) to hypoxanthine (or inosine) deaminations, as well as non-templated nucleotide additions and insertions. In some embodiments, the nucleobase editing domain is a deaminase domain (e.g., an adenine deaminase or an adenosine deaminase; or a cytidine deaminase or a cytosine deaminase). In some embodiments, the nucleobase editing domain is more than one deaminase domain (e.g., an adenine deaminase or an adenosine deaminase and a cytidine or a cytosine deaminase). In some embodiments, the nucleobase editing domain can be a naturally occurring nucleobase editing domain. In some embodiments, the nucleobase editing domain can be an engineered or evolved nucleobase editing domain from the naturally occurring nucleobase editing domain. The nucleobase editing domain can be from any organism, such as a bacterium, human, chimpanzee, gorilla, monkey, cow, dog, rat, or mouse.

[0134] As used herein, “obtaining” as in “obtaining an agent” includes synthesizing, purchasing, or otherwise acquiring the agent.

[0135] A “patient” or “subject” as used herein refers to a mammalian subject or individual diagnosed with, at risk of having or developing, or suspected of having or developing a disease or a disorder. In some embodiments, the term “patient” refers to a mammalian subject with a higher than average likelihood of developing a disease or a disorder. Exemplary patients can be humans, non-human primates, cats, dogs, pigs, cattle, cats, horses, camels, llamas, goats, sheep, rodents (e.g., mice, rabbits, rats, or guinea pigs) and other mammalians that can benefit from the therapies disclosed herein. Exemplary human patients can be male and/or female.

[0136] “Patient in need thereof” or “subject in need thereof” is referred to herein as a patient diagnosed with, at risk or having, predetermined to have, or suspected of having a disease or disorder.

[0137] The terms “protein,” “peptide,” “polypeptide,” and their grammatical equivalents are used interchangeably herein, and refer to a polymer of amino acid residues linked together by peptide (amide) bonds. The terms refer to a protein, peptide, or polypeptide of any size, structure, or function. Typically, a protein, peptide, or polypeptide will be at least three amino acids long. A protein, peptide, or polypeptide can refer to an individual protein or a collection of proteins. One or more of the amino acids in a protein, peptide, or polypeptide can be modified, for example, by the addition of a chemical entity such as a carbohydrate group, a hydroxyl group, a phosphate group, a farnesyl group, an isofarnesyl group, a fatty acid group, a linker for conjugation, functionalization, or other modifications, etc. A protein, peptide, or polypeptide can also be a single molecule or can be a multi-molecular complex. A protein, peptide, or polypeptide can be just a fragment of a naturally occurring protein or peptide. A protein, peptide, or polypeptide can be naturally occurring, recombinant, or synthetic, or any combination thereof. The term “fusion protein” as used herein refers to a hybrid polypeptide which comprises protein domains from at least two different proteins. One protein can be located at the amino-terminal (N-terminal) portion of the fusion protein or at the carboxy-terminal (C-terminal) protein thus forming an amino-terminal fusion protein or a carboxy-terminal fusion protein, respectively. A protein can comprise different domains, for example, a nucleic acid binding domain (e.g., the gRNA binding domain of Cas9 that directs the binding of the protein to a target site) and a nucleic acid cleavage domain, or a catalytic domain of a nucleic acid editing protein. In some embodiments, a protein comprises a proteinaceous part, e.g., an amino acid sequence constituting a nucleic acid binding domain, and an organic compound, e.g., a compound that can act as a nucleic acid cleavage agent. In some embodiments, a protein is in a complex with, or is in association with, a nucleic acid, e.g., RNA or DNA. Any of the proteins provided herein can be produced by any method known in the art. For example, the proteins provided herein can be produced via recombinant protein expression and purification, which is especially suited for fusion proteins comprising a peptide linker. Methods for recombinant protein expression and purification are well known, and include those described by Green and Sambrook, Molecular Cloning: A Laboratory Manual (4th ed., Cold Spring Harbor Laboratory Press, Cold Spring Harbor, N.Y. (2012)), the entire contents of which are incorporated herein by reference.

[0138] Polypeptides and proteins disclosed herein (including functional portions and functional variants thereof) can comprise synthetic amino acids in place of one or more naturally-occurring amino acids. Such synthetic amino acids are known in the art, and include, for example, aminocyclohexane carboxylic acid, norleucine, α-amino n-decanoic acid, homoserine, S-acetylaminomethyl-cysteine, trans-3- and trans-4-hydroxyproline, 4-aminophenylalanine, 4-nitrophenylalanine, 4-chlorophenylalanine, 4-carboxyphenylalanine, β-phenylserine β-hydroxyphenylalanine, phenylglycine, α-naphthylalanine, cyclohexylalanine, cyclohexylglycine, indoline-2-carboxylic acid, 1,2,3,4-tetrahydroisoquinoline-3-carboxylic acid, aminomalonic acid, aminomalonic acid monoamide, N′-benzyl-N′-methyl-lysine, N′,N′-dibenzyl-lysine, 6-hydroxylysine, ornithine, α-aminocyclopentane carboxylic acid, α-aminocyclohexane carboxylic acid, α-aminocycloheptane carboxylic acid, α-(2-amino-2-norbornane)-carboxylic acid, α,γ-diaminobutyric acid, α,β-diaminopropionic acid, homophenylalanine, and α-tert-butylglycine. The polypeptides and proteins can be associated with post-translational modifications of one or more amino acids of the polypeptide constructs. Non-limiting examples of post-translational modifications include phosphorylation, acylation including acetylation and formylation, glycosylation (including N-linked and O-linked), amidation, hydroxylation, alkylation including methylation and ethylation, ubiquitylation, addition of pyrrolidone carboxylic acid, formation of disulfide bridges, sulfation, myristoylation, palmitoylation, isoprenylation, farnesylation, geranylation, glypiation, lipoylation and iodination.

[0139] The term “recombinant” as used herein in the context of proteins or nucleic acids refers to proteins or nucleic acids that do not occur in nature, but are the product of human engineering. For example, in some embodiments, a recombinant protein or nucleic acid molecule comprises an amino acid or nucleotide sequence that comprises at least one, at least two, at least three, at least four, at least five, at least six, or at least seven mutations as compared to any naturally occurring sequence.

[0140] By “reduces” is meant a negative alteration of at least 10%, 25%, 50%, 75%, or 100%.

[0141] By “reference” is meant a standard or control condition. In one embodiment, the viral load present in a cell treated with a base editor system described herein is compared to the level of HBV infection present in an untreated control cell, which control serves as a reference. In another embodiment, the sequence of an HBV genome present in cell contacted with a base editor system described herein is compared to the sequence of an HBV genome present in an untreated control cell.

[0142] A “reference sequence” is a defined sequence used as a basis for sequence comparison. A reference sequence may be a subset of or the entirety of a specified sequence; for example, a segment of a full-length cDNA or gene sequence, or the complete cDNA or gene sequence. For polypeptides, the length of the reference polypeptide sequence will generally be at least about 16 amino acids, at least about 20 amino acids, at least about 25 amino acids, about 35 amino acids, about 50 amino acids, or about 100 amino acids. For nucleic acids, the length of the reference nucleic acid sequence will generally be at least about 50 nucleotides, at least about 60 nucleotides, at least about 75 nucleotides, about 100 nucleotides, or about 300 nucleotides or any integer thereabout or therebetween. In some embodiments, a reference sequence is a wild-type sequence of a protein of interest. In other embodiments, a reference sequence is a polynucleotide sequence encoding a wild-type protein.

[0143] The term “RNA-programmable nuclease,” and “RNA-guided nuclease” are used with (e.g., binds or associates with) one or more RNA(s) that is not a target for cleavage. In some embodiments, an RNA-programmable nuclease, when in a complex with an RNA, may be referred to as a nuclease:RNA complex. Typically, the bound RNA(s) is referred to as a guide RNA (gRNA). In some embodiments, the RNA-programmable nuclease is the (CRISPR-associated system) Cas9 endonuclease, for example, Cas9 (Csn1) from Streptococcus pyogenes (See, e.g., “Complete genome sequence of an M1 strain of Streptococcus pyogenes.” Ferretti J. J., McShan W. M., Ajdic D. J., Savic D. J., Savic G., Lyon K., Primeaux C, Sezate S., Suvorov A. N., Kenton S., Lai H. S., Lin S. P., Qian Y., Jia H. G., Najar F. Z., Ren Q., Zhu H., Song L., White J., Yuan X., Clifton S. W., Roe B. A., McLaughlin R. E., Proc. Natl. Acad. Sci. U.S.A. 98:4658-4663(2001); “CRISPR RNA maturation by trans-encoded small RNA and host factor RNase III.” Deltcheva E., Chylinski K., Sharma C M., Gonzales K., Chao Y., Pirzada Z. A., Eckert M. R., Vogel J., Charpentier E., Nature 471:602-607(2011).

[0144] By “specifically binds” is meant a nucleic acid molecule, polypeptide, or complex thereof (e.g., a nucleic acid programmable DNA binding domain and guide nucleic acid), compound, or molecule that recognizes and binds a polypeptide and/or nucleic acid molecule of the invention, but which does not substantially recognize and bind other molecules in a sample, for example, a biological sample.

[0145] Nucleic acid molecules useful in the methods of the invention include any nucleic acid molecule that encodes a polypeptide of the invention or a fragment thereof. Such nucleic acid molecules need not be 100% identical with an endogenous nucleic acid sequence, but will typically exhibit substantial identity. Polynucleotides having “substantial identity” to an endogenous sequence are typically capable of hybridizing with at least one strand of a double-stranded nucleic acid molecule. Nucleic acid molecules useful in the methods of the invention include any nucleic acid molecule that encodes a polypeptide of the invention or a fragment thereof. Such nucleic acid molecules need not be 100% identical with an endogenous nucleic acid sequence, but will typically exhibit substantial identity. Polynucleotides having “substantial identity” to an endogenous sequence are typically capable of hybridizing with at least one strand of a double-stranded nucleic acid molecule. By “hybridize” is meant pair to form a double-stranded molecule between complementary polynucleotide sequences (e.g., a gene described herein), or portions thereof, under various conditions of stringency. (See, e.g., Wahl, G. M. and S. L. Berger (1987) Methods Enzymol. 152:399; Kimmel, A. R. (1987) Methods Enzymol. 152:507).

[0146] For example, stringent salt concentration will ordinarily be less than about 750 mM NaCl and 75 mM trisodium citrate, preferably less than about 500 mM NaCl and 50 mM trisodium citrate, and more preferably less than about 250 mM NaCl and 25 mM trisodium citrate. Low stringency hybridization can be obtained in the absence of organic solvent, e.g., formamide, while high stringency hybridization can be obtained in the presence of at least about 35% formamide, and more preferably at least about 50% formamide. Stringent temperature conditions will ordinarily include temperatures of at least about 30° C., more preferably of at least about 37° C., and most preferably of at least about 42° C. Varying additional parameters, such as hybridization time, the concentration of detergent, e.g., sodium dodecyl sulfate (SDS), and the inclusion or exclusion of carrier DNA, are well known to those skilled in the art. Various levels of stringency are accomplished by combining these various conditions as needed. In a preferred: embodiment, hybridization will occur at 30° C. in 750 mM NaCl, 75 mM trisodium citrate, and 1% SDS. In a more preferred embodiment, hybridization will occur at 37° C. in 500 mM NaCl, 50 mM trisodium citrate, 1% SDS, 35% formamide, and 100 μg/ml denatured salmon sperm DNA (ssDNA). In a most preferred embodiment, hybridization will occur at 42° C. in 250 mM NaCl, 25 mM trisodium citrate, 1% SDS, 50% formamide, and 200 μg/ml ssDNA. Useful variations on these conditions will be readily apparent to those skilled in the art.

[0147] For most applications, washing steps that follow hybridization will also vary in stringency. Wash stringency conditions can be defined by salt concentration and by temperature. As above, wash stringency can be increased by decreasing salt concentration or by increasing temperature. For example, stringent salt concentration for the wash steps will be less than about 30 mM NaCl and 3 mM trisodium citrate or less than about 15 mM NaCl and 1.5 mM trisodium citrate. Stringent temperature conditions for the wash steps will ordinarily include a temperature of at least about 25° C., at least about 42° C. or even at least about 68° C. In an embodiment, wash steps will occur at 25° C. in 30 mM NaCl, 3 mM trisodium citrate, and 0.1% SDS. In another embodiment, wash steps will occur at 42° C. in 15 mM NaCl, 1.5 mM trisodium citrate, and 0.1% SDS. In a more preferred embodiment, wash steps will occur at 68° C. in 15 mM NaCl, 1.5 mM trisodium citrate, and 0.1% SDS. Additional variations on these conditions will be readily apparent to those skilled in the art. Hybridization techniques are well known to those skilled in the art and are described, for example, in Benton and Davis (Science 196:180, 1977); Grunstein and Hogness (Proc. Natl. Acad. Sci., USA 72:3961, 1975); Ausubel et al. (Current Protocols in Molecular Biology, Wiley Interscience, New York, 2001); Berger and Kimmel (Guide to Molecular Cloning Techniques, 1987, Academic Press, New York); and Sambrook et al., Molecular Cloning: A Laboratory Manual, Cold Spring Harbor Laboratory Press, New York.

[0148] By “split” is meant divided into two or more fragments.

[0149] A “split Cas9 protein” or “split Cas9” refers to a Cas9 protein that is provided as an N-terminal fragment and a C-terminal fragment encoded by two separate nucleotide sequences. The polypeptides corresponding to the N-terminal portion and the C-terminal portion of the Cas9 protein may be spliced to form a “reconstituted” Cas9 protein. In particular embodiments, the Cas9 protein is divided into two fragments within a disordered region of the protein, e.g., as described in Nishimasu et al., Cell, Volume 156, Issue 5, pp. 935-949, 2014, or as described in Jiang et al. (2016) Science 351: 867-871. PDB file: 5F9R, each of which is incorporated herein by reference. In some embodiments, the protein is divided into two fragments at any C, T, A, or S within a region of SpCas9 between about amino acids A292-G364, F445-K483, or E565-T637, or at corresponding positions in any other Cas9, Cas9 variant (e.g., nCas9, dCas9), or other napDNAbp. In some embodiments, protein is divided into two fragments at SpCas9 T310, T313, A456, S469, or C574. In some embodiments, the process of dividing the protein into two fragments is referred to as “splitting” the protein.

[0150] In other embodiments, the N-terminal portion of the Cas9 protein comprises amino acids 1-573 or 1-637 S. pyogenes Cas9 wild-type (SpCas9) (NCBI Reference Sequence: NC_002737.2, Uniprot Reference Sequence: Q99ZW2) and the C-terminal portion of the Cas9 protein comprises a portion of amino acids 574-1368 or 638-1368 of SpCas9 wild-type.

[0151] The C-terminal portion of the split Cas9 can be joined with the N-terminal portion of the split Cas9 to form a complete Cas9 protein. In some embodiments, the C-terminal portion of the Cas9 protein starts from where the N-terminal portion of the Cas9 protein ends. As such, in some embodiments, the C-terminal portion of the split Cas9 comprises a portion of amino acids (551-651)-1368 of spCas9. “(551-651)-1368” means starting at an amino acid between amino acids 551-651 (inclusive) and ending at amino acid 1368. For example, the C-terminal portion of the split Cas9 may comprise a portion of any one of amino acid 551-1368, 552-1368, 553-1368, 554-1368, 555-1368, 556-1368, 557-1368, 558-1368, 559-1368, 560-1368, 561-1368, 562-1368, 563-1368, 564-1368, 565-1368, 566-1368, 567-1368, 568-1368, 569-1368, 570-1368, 571-1368, 572-1368, 573-1368, 574-1368, 575-1368, 576-1368, 577-1368, 578-1368, 579-1368, 580-1368, 581-1368, 582-1368, 583-1368, 584-1368, 585-1368, 586-1368, 587-1368, 588-1368, 589-1368, 590-1368, 591-1368, 592-1368, 593-1368, 594-1368, 595-1368, 596-1368, 597-1368, 598-1368, 599-1368, 600-1368, 601-1368, 602-1368, 603-1368, 604-1368, 605-1368, 606-1368, 607-1368, 608-1368, 609-1368, 610-1368, 611-1368, 612-1368, 613-1368, 614-1368, 615-1368, 616-1368, 617-1368, 618-1368, 619-1368, 620-1368, 621-1368, 622-1368, 623-1368, 624-1368, 625-1368, 626-1368, 627-1368, 628-1368, 629-1368, 630-1368, 631-1368, 632-1368, 633-1368, 634-1368, 635-1368, 636-1368, 637-1368, 638-1368, 639-1368, 640-1368, 641-1368, 642-1368, 643-1368, 644-1368, 645-1368, 646-1368, 647-1368, 648-1368, 649-1368, 650-1368, or 651-1368 of spCas9. In some embodiments, the C-terminal portion of the split Cas9 protein comprises a portion of amino acids 574-1368 or 638-1368 of SpCas9.

[0152] By “subject” is meant a mammal, including, but not limited to, a human or non-human mammal, such as a non-human primate (monkey), bovine, equine, canine, ovine, or feline. In some embodiments, a subject described herein is infected with HBV or has a propensity to develop HBV.

[0153] By “substantially identical” is meant a polypeptide or nucleic acid molecule exhibiting at least 50% identity to a reference amino acid sequence (for example, any one of the amino acid sequences described herein) or nucleic acid sequence (for example, any one of the nucleic acid sequences described herein). In one embodiment, such a sequence is at least 60%, 80%, 85%, 90%, 95% or even 99% identical at the amino acid level or nucleic acid to the sequence used for comparison.

[0154] Sequence identity is typically measured using sequence analysis software (for example, Sequence Analysis Software Package of the Genetics Computer Group, University of Wisconsin Biotechnology Center, 1710 University Avenue, Madison, Wis. 53705, BLAST, BESTFIT, GAP, or PILEUP/PRETTYBOX programs). Such software matches identical or similar sequences by assigning degrees of homology to various substitutions, deletions, and/or other modifications. Conservative substitutions typically include substitutions within the following groups: glycine, alanine; valine, isoleucine, leucine; aspartic acid, glutamic acid, asparagine, glutamine; serine, threonine; lysine, arginine; and phenylalanine, tyrosine. In an exemplary approach to determining the degree of identity, a BLAST program may be used, with a probability score between e⁻³ and e⁻¹⁰⁰ indicating a closely related sequence. COBALT is used, for example, with the following parameters:
[0155] a) alignment parameters: Gap penalties-11,-1 and End-Gap penalties-5,-1,
[0156] b) CDD Parameters: Use RPS BLAST on; Blast E-value 0.003; Find Conserved columns and Recompute on, and
[0157] c) Query Clustering Parameters: Use query clusters on; Word Size 4; Max cluster distance 0.8; Alphabet Regular.
   EMBOSS Needle is used, for example, with the following parameters:
[0158] a) Matrix: BLOSUM62;
[0159] b) GAP OPEN: 10;
[0160] c) GAP EXTEND: 0.5;
[0161] d) OUTPUT FORMAT: pair;
[0162] e) END GAP PENALTY: false;
[0163] f) END GAP OPEN: 10; and
[0164] g) END GAP EXTEND: 0.5.

[0165] The term “target site” refers to a sequence within a nucleic acid molecule that is deaminated by a deaminase or a fusion protein comprising a deaminase (e.g., cytidine or adenine deaminase) fusion protein or a base editor disclosed herein).

[0166] Because RNA-programmable nucleases (e.g., Cas9) use RNA:DNA hybridization to target DNA cleavage sites, these proteins are able to be targeted, in principle, to any sequence specified by the guide RNA. Methods of using RNA-programmable nucleases, such as Cas9, for site-specific cleavage (e.g., to modify a genome) are known in the art (see e.g., Cong, L. et ah, Multiplex genome engineering using CRISPR/Cas systems. Science 339, 819-823 (2013); Mali, P. et ah, RNA-guided human genome engineering via Cas9. Science 339, 823-826 (2013); Hwang, W. Y. et ah, Efficient genome editing in zebrafish using a CRISPR-Cas system. Nature biotechnology 31, 227-229 (2013); Jinek, M. et ah, RNA-programmed genome editing in human cells. eLife 2, e00471 (2013); Dicarlo, J. E. et ah, Genome engineering in Saccharomyces cerevisiae using CRISPR-Cas systems. Nucleic acids research (2013); Jiang, W. et ah RNA-guided editing of bacterial genomes using CRISPR-Cas systems. Nature biotechnology 31, 233-239 (2013); the entire contents of each of which are incorporated herein by reference).

[0167] As used herein, the terms “treat,” treating,” “treatment,” and the like refer to reducing or ameliorating a disorder and/or symptoms associated therewith or obtaining a desired pharmacologic and/or physiologic effect. It will be appreciated that, although not precluded, treating a disorder or condition does not require that the disorder, condition or symptoms associated therewith be completely eliminated. In some embodiments, the effect is therapeutic, i.e., without limitation, the effect partially or completely reduces, diminishes, abrogates, abates, alleviates, decreases the intensity of, or cures a disease and/or adverse symptom attributable to the disease. In some embodiments, the effect is preventative, i.e., the effect protects or prevents an occurrence or reoccurrence of a disease or condition. To this end, the presently disclosed methods comprise administering a therapeutically effective amount of a compositions as described herein. In one embodiment, the invention provides for the treatment of HBV infection.

[0168] By “uracil glycosylase inhibitor” or “UGI” is meant an agent that inhibits the uracil-excision repair system. In one embodiment, the agent is a protein or fragment thereof that binds a host uracil-DNA glycosylase and prevents removal of uracil residues from DNA. In an embodiment, a UGI is a protein, a fragment thereof, or a domain that is capable of inhibiting a uracil-DNA glycosylase base-excision repair enzyme. In some embodiments, a UGI domain comprises a wild-type UGI or a modified version thereof. In some embodiments, a UGI domain comprises a fragment of the exemplary amino acid sequence set forth below. In some embodiments, a UGI fragment comprises an amino acid sequence that comprises at least 60%, at least 65%, at least 70%, at least 75%, at least 80%, at least 85%, at least 90%, at least 95%, at least 96%, at least 97%, at least 98%, at least 99%, or 100% of the exemplary UGI sequence provided below. In some embodiments, a UGI comprises an amino acid sequence that is homologous to the exemplary UGI amino acid sequence or fragment thereof, as set forth below. In some embodiments, the UGI, or a portion thereof, is at least 70%, at least 75%, at least 80%, at least 85%, at least 90%, at least 95%, at least 96%, at least 97%, at least 98%, at least 99%, at least 99.5%, at least 99.9%, or 100% identical to a wild type UGI or a UGI sequence, or portion thereof, as set forth below. An exemplary UGI comprises an amino acid sequence as follows:

>sp1P14739IUNGI_BPPB2 Uracil-DNA glycosylase
inhibitor
MTNLSDIIEKETGKQLVIQESILMLPEEVEEVIGNKPESDILVHTAYDES
TDENVMLLT SD APE YKPW ALVIQDS NGENKIKML.

[0169] Ranges provided herein are understood to be shorthand for all of the values within the range. For example, a range of 1 to 50 is understood to include any number, combination of numbers, or sub-range from the group consisting 1, 2, 3, 4, 5, 6, 7, 8, 9, 10, 11, 12, 13, 14, 15, 16, 17, 18, 19, 20, 21, 22, 23, 24, 25, 26, 27, 28, 29, 30, 31, 32, 33, 34, 35, 36, 37, 38, 39, 40, 41, 42, 43, 44, 45, 46, 47, 48, 49, or 50.

[0170] The recitation of a listing of chemical groups in any definition of a variable herein includes definitions of that variable as any single group or combination of listed groups. The recitation of an embodiment for a variable or aspect herein includes that embodiment as any single embodiment or in combination with any other embodiments or portions thereof.

[0171] Any compositions or methods provided herein can be combined with one or more of any of the other compositions and methods provided herein.

[0172] The description and examples herein illustrate embodiments of the present disclosure in detail. It is to be understood that this disclosure is not limited to the particular embodiments described herein and as such can vary. Those of skill in the art will recognize that there are numerous variations and modifications of this disclosure, which are encompassed within its scope.

[0173] All terms are intended to be understood as they would be understood by a person skilled in the art. Unless defined otherwise, all technical and scientific terms used herein have the same meaning as commonly understood by one of ordinary skill in the art to which the disclosure pertains.

[0174] The practice of some embodiments disclosed herein employ, unless otherwise indicated, conventional techniques of immunology, biochemistry, chemistry, molecular biology, microbiology, cell biology, genomics and recombinant DNA, which are within the skill of the art. See for example Sambrook and Green, Molecular Cloning: A Laboratory Manual, 4th Edition (2012); the series Current Protocols in Molecular Biology (F. M. Ausubel, et al. eds.); the series Methods In Enzymology (Academic Press, Inc.), PCR 2: A Practical Approach (M. J. MacPherson, B. D. Hames and G. R. Taylor eds. (1995)), Harlow and Lane, eds. (1988) Antibodies, A Laboratory Manual, and Culture of Animal Cells: A Manual of Basic Technique and Specialized Applications, 6th Edition (R. I. Freshney, ed. (2010)).

[0175] Although various features of the present disclosure can be described in the context of a single embodiment, the features can also be provided separately or in any suitable combination. Conversely, although the present disclosure can be described herein in the context of separate embodiments for clarity, the present disclosure can also be implemented in a single embodiment. The section headings used herein are for organizational purposes only and are not to be construed as limiting the subject matter described.

[0176] The features of the present disclosure are set forth with particularity in the appended claims. A better understanding of the features and advantages of the present will be obtained by reference to the following detailed description that sets forth illustrative embodiments, in which the principles of the disclosure are utilized, and in view of the accompanying drawings as described hereinbelow.

### BRIEF DESCRIPTION OF THE DRAWINGS

[0177] FIG. 1 is an illustration showing the partially double-stranded and the overlapping open reading frames (ORFs) for the hepatitis B surface antigen (HBsAg) gene, the polymerase gene, the protein X gene, and the core gene. The HBsAg gene comprises ORF PreS1, ORF PreS2, and ORF S, which encode the large, middle, and small surface proteins, respectively. ORF core and Pre C encode capsid proteins.

[0178] FIG. 2 is an illustration depicting the HBV life cycle. The term “ER” denotes endoplasmic reticulum. The term “HBsAg” denotes hepatitis B surface antigen. “HBx transcriptional activator” is an HBV-specific transcriptional activator of polymerase II and III promoters.

[0179] FIG. 3A is a map of the geographic distribution of hepatitis B virus genotypes worldwide.

[0180] FIG. 3B provides a summary of a base editing strategies for introducing stop codons in viral genes and for generating abasic sites to treat chronic HBV.

[0181] FIG. 3C provides a summary of guide RNA screening strategies adapted for introducing stop codons and for generating abasic via base editing.

[0182] FIG. 3D is a diagram illustrating conserved gRNA design for generating abasic sites in cccDNA.

[0183] FIG. 3E is a diagram of the HBV cccDNA showing the relative position of 16 guide RNAs (depicted as triangles) that are expected to generate an amino acid that occurs in less than 0.05% of HBV genomes.

[0184] FIG. 3F is a graph showing the highest percentage of base editing generated by gRNA candidates.

[0185] FIG. 3G is a chart summarizing information relating to gRNA candidates.

[0186] FIGS. 4A and 4B depict base editors. FIG. 4A is a depiction of a base editor having an APOBEC cytidine deaminase domain, a Cas9 domain, and two uracil glycosylase inhibitor (UGI) domains. FIG. 4B provides a diagram of BE4.

[0187] FIG. 5 is an illustration showing where guide RNAs of the present disclosure map to the HBV genome. Each triangle represents a unique guide RNA.

[0188] FIG. 6 is a schematic illustration summarizing the screen for guide RNA molecules that target an HBV gene and a subset of observed results from the screen. “PAM” refers to protospacer adjacent motif “Pol” refers to the HBV polymerase gene; “S” refers to the HBV surface protein; “X” refers to the HBV protein X gene; and “Core” refers to the HBV core protein. MSPbeam52, 50, . . . , etc. refer to guide RNA, which are also termed M52, M50, . . . etc., in the application. The screen identified 12 gRNAs that exhibited greater than 20% on-target base editing.

[0189] FIG. 7 comprises graphs comparing the BE4 and A3ABE4 base editors. The graphs show the percent editing observed for different guide RNAs used with each base editor. MSPbeam39, 40, . . . , etc. are also termed M39, M40, . . . , etc., in the application.

[0190] FIG. 8 is a graph illustrating functional base editing observed in a HepG2-NTCP cell line transduced with an HBV lentiviral vector and transfected with a nucleic acid construct encoding a base editor. The nucleic acid constructs tested were DNA molecules, wild type RNA molecules, or RNA molecules comprising pseudo-uridine (PsU) modified at the N1 residue. “NTCP” refers to sodium taurocholate co-transporting polypeptide. MSPbeam39, 40, . . . , etc. are also termed M39, M40, . . . , etc., in the application.

[0191] FIG. 9 is a graph illustrating functional base editing observed in a HepG2-NTCP cell line transduced with an HBV lentiviral vector and transfected with a nucleic acid construct encoding a base editor. The nucleic acid constructs tested were DNA format transfection (two plasmids one encoding the base editor and one encoding the gRNA) or RNA format (PsU-modified in-house mRNA encoding the base editor where the RNA is modified at the N1 residue and a synthetic gRNA). Up to 80% editing in HepG2-NTCP lenti HBV cell lines was observed when using base editors and lead Stop/Functional Change (“FC”) gRNAs in an RNA format. “NTCP” refers to sodium taurocholate co-transporting polypeptide. MSPbeam39, 40, . . . , etc. are also termed M39, M40, . . . , etc., in the application.

[0192] FIG. 10 is a graph illustrating functional base editing observed in a HepG2-NTCP cell line transduced with an HBV lentiviral vector and transfected with one of three nucleic acid constructs encoding a BE4, BE4-VRQR, or ABE base editor. MSPbeam39, 40, . . . , etc. are also termed M39, M40, . . . , etc., in the application.

[0193] FIG. 11 is an illustration depicting guide RNAs that map to conserved regions of the HBV genome.

[0194] FIG. 12A is a schematic illustrating long-term primary hepatocyte co-cultures. FIG. 12B provides an experimental timeline for hepatocyte monolayers or hepatocyte co-cultures.

[0195] FIG. 12C shows images of transduced primary hepatocytes from donors (RSE, TVR) used in the co-culture system.

[0196] FIGS. 13A-13F characterize an HBV-infected primary human hepatocyte (PHH) system. FIG. 13A is a timeline showing the infection and treatment schedule for the 13 days from plating to study end-point. FIG. 13B is a graph showing the amount of extracellular HBV DNA present in a PHH culture after no treatment of HBV infected PHH cells, treatment with interferon, or treatment with tenofovir. As a negative control, PHH cells were exposed to the HBV virus without polyethylene glycol. FIG. 13C is a graph showing the amount of HBV surface antigen (HBsAg) present in PHH cultures exposed to the experimental conditions described in the legend for FIGS. 13B and 13C. FIG. 13D is a graph showing the amount of intracellular HBV DNA present in PHH cultures exposed to the experimental conditions described in the legend for FIGS. 13B and 13C. FIG. 13E is a graph showing the amount of total HBV RNA present in PHH cultures exposed to the experimental conditions described in the legend for FIGS. 13B and 13C. FIG. 13F is a graph showing the amount of pregenomic RNA (pgRNA) present in PHH cultures exposed to the experimental conditions described in the legend for FIGS. 13B and 13C.

[0197] FIG. 14 is a graph showing that transfection with a BE4 and gRNAs leads to a decrease in HBV marker levels in HBV infected PHH. Guide RNAs 52 and 190, which target the BE4 base editor to the Pol and X gene regions of the HBV genome, respectively, were used. BE4 was tested with and without a Uridine Glycosylase Inhibitor (UGI) domain.

[0198] FIG. 15 is a graph showing the identification of functional guide RNAs in a screen in HBV-infected PHH cells, where decreased levels of HBsAg, which is a surrogate of cccDNA, are indicative of a functional gRNA. Guide RNAs introducing stop codons are noted as Stop-39, etc. . . . , Guide RNAs introducing changes at conserved amino acids are indicated as Conserved-4, etc. . . . gRNAs (Stop-191, Conserved-12) selected for further analysis are indicated with boxes.

[0199] FIGS. 16A and 16B illustrate mechanistic aspects of base editing action on HBV. FIG. 16A is a graph showing the levels of HBsAg in HBV infected PHH cells transfected with mRNA encoding either a BE4 base editor with a UGI domain (BE4), a BE4 base editor with no UGI domain (BE4_noUGI), Cas9, a catalytically dead (i.e., having no nickase activity) BE4 base editor with no UGI domain (dBE4_noUGI), or a dead Cas9 (dCas9). The cells were transfected with mRNA encoding the base editor only, or were also transfected with either gRNA191 or gRNA12. FIG. 16B is a graph showing the levels of extracellular HBV DNA in HBV infected PHH cells transfected as described for FIG. 16A.

[0200] FIGS. 17A and 17B compare base editing in HepG2-NTCP Lenti-HBV and HBV infected PHH. FIG. 17A is a graph showing the editing efficiencies observed in HepG2-NTCP Lenti-HBV transfected with BE4 and UGI versus BE4 without UGI. FIG. 17B is a graph showing the editing efficiencies observed in HBV infected PHH transfected with BE4 and UGI versus BE4 without UGI.

[0201] FIG. 18 is a graph comparing the base editing, indel rates, and transversion rates (i.e., C to A or G) using gRNA190 in HBV-Lenti-HepG2 versus HBV infected PHH.

[0202] FIG. 19 shows a schematic timeline related to the use of primary hepatocyte co-culture (PHH) infected with HBV virus as a clinically relevant system for assessing anti-viral activity of the base editing reagents described herein. In some embodiments, PHH co-cultures infected with HBV were used in the experiments described herein to assay and assess the antiviral efficacy of the base editors. In brief, the base editing reagents (base editor mRNA and synthetic gRNA) were transfected into PHH co-cultures via lipofection twice over the course of two weeks. The first transfection was performed 3 days after infection with HBV to ensure that the cccDNA was completely formed at the time of virus transfection. Extracellular parameters (HBsAg, HBeAg, and HBV DNA) were monitored over the course of the described experiments, and intracellular parameters (HBV DNA, viral RNA, and editing) were monitored at the end of the described experiments. HbsAg refers to the surface protein antigen of HBV. Its detection indicates HBV infection in an individual. HBeAg refers to the hepatitis B e-antigen, a HBV protein antigen that circulates in infected blood when the virus is actively replicating. The presence of FHBeAg suggests that an individual is infectious and is able to spread the virus to others.

[0203] FIG. 20 shows a bar graph presenting the results of a 14-day experiment employing HBV-infected primary hepatocyte co-cultures (PHH) and gRNA12, which targets a polynucleotide sequence in the intersection of the HBV Polymerase and S gene sequences. The antiviral drug entecavir was used as a control to assess the efficacy of the base editors (BE4 and BE4-noUGI). As observed, the BE4-noUGI base editor and the gRNA12 resulted in a reduction of all 4 viral marker parameters tested, namely, a reduction in the amounts or levels of the HBV DNA, HBsAg, HBeAg and pgRNA marker parameters. In addition, the BE4-noUGI base editor and the gRNA12 showed an overall superior performance in reducing all 4 HBV parameters tested compared with entecavir. Accordingly, the base editing approach described herein was demonstrated to be more efficient in reducing the viral (HBV) parameters tested compared with the HBV antiviral drug entecavir.

[0204] FIG. 21 shows a bar graph presenting the results of employing multiple gRNAs (gRNA multiplexing) in conjunction with BE4. The HBV parameters assessed included pgRNA, HBsAg, HBeAg and HBV total DNA. The results indicate a gRNA-specific reduction in particular HBV parameters, with gRNA19 demonstrating an improved HBV inhibition activity compared with other gRNAs tested. In addition, a measurable improvement in HBV inhibition was observed using gRNA multiplexing, particularly with the combination of gRNA19+gRNA190, and with a combination of gRNA190, gRNA12, gRNA40 and gRNA52, which showed optimal HBV inhibition activities.

[0205] FIG. 22 shows a bar graph presenting the results of base editing using the HBV-infected PHH culture system and the BE4 base editor. NGS sequencing was performed on the total DNA purified from HBV-infected PHH cultures and on the same samples enriched for cccDNA. The results demonstrated significantly increased base editing (% base editing) in cccDNA enriched samples, thus indicating the successful base editing of HBV cccDNA by the BE4 base editor and gRNAs. The finding of reduced base editing in total genomic DNA purified from HBV-PHH suggests the inability of edited cccDNA to propagate into a replication-competent viral particle.

[0206] FIG. 23 shows a bar graph presenting the results of employing multiple gRNAs (gRNA multiplexing) with BE4 and noUGI (BE4_noUGI), e.g., as described in Example 10, infra. The HBV parameters assessed included HBsAg, HBeAg, pgRNA and HBV total DNA. The results indicate a significant gRNA-specific inhibition of HBV parameters, with gRNA12 and gRNA19 demonstrating increased inhibition activities. In addition, the HBV-inhibition activity of gRNA19 with BE_noUGI was found to be equally effective as combinations of other gRNAs tested.

[0207] FIG. 24 shows a bar graph presenting the results of base editing using the HBV-infected PHH culture system and the BE4_noUGI base editor. NGS sequencing was performed on the total DNA purified from HBV-infected PHH cultures and on the same samples enriched for cccDNA. The results demonstrated significantly increased base editing (% base editing) in cccDNA enriched samples, thus indicating the successful base editing of HBV cccDNA by BE_noUGI and gRNAs. The finding of robust base editing activity in total genomic DNA purified from HBV-PHH suggests the inability of edited cccDNA to propagate into a replication-competent viral particle.

[0208] FIGS. 25A-25D show graphs and bar graphs related to the use of the base editor dBE4_noUGI (H840A) without nickase activity and the HBV-infected PHH system in a long term (e.g., 25-day) experiment to assess the efficacy of the base editor on HBV viral parameters HBsAg (FIG. 25A), extracellular HBV DNA (FIG. 25B), HBeAg (FIG. 25C), and albumin (cell viability/metabolic rate), (FIG. 25D). The results of this experiment showed that dBE4_noUGI (D10A_H840A) and gRNA12 reduced viral parameters in HBV-infected PHH. In addition, while both interferon and the base editing components (dBE4_noUGI+gRNA12) decreased HBV viral parameters, interferon treatment was found to be more toxic compared to the use of the base editor and base editing system described herein. Base editor dBE4_noUGI (H840A) comprises the amino acid sequence

MSSETGPVAVDPTLRRRIEPHEFEVFFDPRELRKETCLLYEINWGGRHSI
WRHTSQNTNKHVEVNFIEKFTTERYFCPNTRCSITWFLSWSPCGECSRAI
TEFLSRYPHVTLFIYIARLYHHADPRNRQGLRDLISSGVTIQIMTEQESG
YCWRNFVNYSPSNEAHWPRYPHLWVRLYVLELYCIILGLPPCLNILRRKQ
PQLTFFTIALQSCHYQRLPPHILWATGLKSGGSSGGSSGSETPGTSESAT
PESSGGSSGGSDKKYSIGLAIGTNSVGWAVITDEYKVPSKKFKVLGNTDR
HSIKKNLIGALLFDSGETAEATRLKRTARRRYTRRKNRICYLQEIFSNEM
AKVDDSFFHRLEESFLVEEDKKHERHPIFGNIVDEVAYHEKYPTIYHLRK
KLVDSTDKADLRLIYLALAHMIKFRGHFLIEGDLNPDNSDVDKLFIQLVQ
TYNQLFEENPINASGVDAKAILSARLSKSRRLENLIAQLPGEKKNGLFGN
LIALSLGLTPNFKSNFDLAEDAKLQLSKDTYDDDLDNLLAQIGDQYADLF
LAAKNLSDAILLSDILRVNTEITKAPLSASMIKRYDEHHQDLTLLKALVR
QQLPEKYKEIFFDQSKNGYAGYIDGGASQEEFYKFIKPILEKMDGTEELL
VKLNREDLLRKQRTFDNGSIPHQIHLGELHAILRRQEDFYPFLKDNREKI
EKILTFRIPYYVGPLARGNSRFAWMTRKSEETITPWNFEEVVDKGASAQS
FIERMTNFDKNLPNEKVLPKHSLLYEYFTVYNELTKVKYVTEGMRKPAFL
SGEQKKAIVDLLFKTNRKVTVKQLKEDYFKKIECFDSVEISGVEDRFNAS
LGTYHDLLKIIKDKDFLDNEENEDILEDIVLTLTLFEDREMIEERLKTYA
HLFDDKVMKQLKRRRYTGWGRLSRKLINGIRDKQSGKTILDFLKSDGFAN
RNFMQLIHDDSLTFKEDIQKAQVSGQGDSLHEHIANLAGSPAIKKGILQT
VKVVDELVKVMGRHKPENIVIEMARENQTTQKGQKNSRERMKRIEEGIKE
LGSQILKEHPVENTQLQNEKLYLYYLQNGRDMYVDQELDINRLSDYDVDA
IVPQSFLKDDSIDNKVLTRSDKNRGKSDNVPSEEVVKKMKNYWRQLLNAK
LITQRKFDNLTKAERGGLSELDKAGFIKRQLVETRQITKHVAQILDSRMN
TKYDENDKLIREVKVITLKSKLVSDFRKDFQFYKVREINNYHHAHDAYLN
AVVGTALIKKYPKLESEFVYGDYKVYDVRKMIAKSEQEIGKATAKYFFYS
NIMNFFKTEITLANGEIRKRPLIETNGETGEIVWDKGRDFATVRKVLSMP
QVNIVKKTEVQTGGFSKESILPKRNSDKLIARKKDWDPKKYGGFDSPTVA
YSVLVVAKVEKGKSKKLKSVKELLGITIMERSSFEKNPIDFLEAKGYKEV
KKDLIIKLPKYSLFELENGRKRMLASAGELQKGNELALPSKYVNFLYLAS
HYEKLKGSPEDNEQKQLFVEQHKHYLDEIIEQISEFSKRVILADANLDKV
LSAYNKHRDKPIREQAENIIHLFTLTNLGAPAAFKYFDTTIDRKRYTSTK
EVLDATLIHQSITGLYETRIDLSQLGGDSGGSKRTADGSEFESPKKKRKV
E

[0209] FIGS. 26A-26C present graphs and bar graphs showing the results of long-term (e.g., 25 day) experiments involving PHH cultures infected with HBV of genotypes D and C to assess the base editor (e.g., dBE4_no UGI) and BE system (e.g., dBE4_no UGI+gRNA, e.g., gRNA12) as described herein in reducing or inhibiting HBV by assessing HBV parameters, namely, HBsAg (FIG. 26A), HBeAg (FIG. 26B) and extracellular HBV DNA (FIG. 26C). The experiments demonstrated that HBV of genotype C infected cells more aggressively, as the viral load was higher at the termination of the experiment. In addition, transfection of HBV-infected PHH cultures with dBE4_no UGI and gRNA12 led to a reduction of viral parameters compared to controls for both HBV of genotype D and HBV of genotype C.

[0210] FIGS. 27A and 27B present bar graphs demonstrating the results of transfection of HBV-infected PHH cultures with the adenine base editor ABE7.10 and an HBV-specific gRNA, e.g., gRNA94, which targets HBV polymerase active site. As demonstrated, ABE7.10+gRNA94 showed significant gRNA-specific HBV inhibition and reduction of the HBV markers HBsAg, HBeAg, pgRNA and HBV total DNA in the assayed PHH cultures relative to controls (no treatment of PHH and ABE7.10-only treatment of PHH). (FIG. 27A). In addition, ABE7.10+gRNA94 in HBV-infected PHH resulted in robust HBV cccDNA editing. (FIG. 27B). The lack of base editing observed in total HBV genomic DNA suggests an inability of edited HBV cccDNA to propagate into a replication-competent viral particle.

### DETAILED DESCRIPTION OF THE INVENTION

[0211] The invention features compositions and methods for editing the HBV genome. For example, the compositions contemplated herein can, in some embodiments, include a base editor a guide nucleic acid that targets a particular nucleotide in an HBV gene. In some embodiments, the editing introduces a premature stop codon in the coding sequence of one of the viral proteins. In another embodiment, the editing introduces one or more functional substitutions in the coding sequence of one or more HBV proteins.

[0212] The HBV genome comprises 3.2 kb of partially double-stranded DNA and open read frames (ORFs) encoding seven proteins. Referring to FIG. 1, the open reading frame (ORF) P encodes the viral polymerase. The ORF C/PreC encodes capsid proteins. ORF PreS1, ORF PreS2, and ORF S encode large (L), middle (M) and small (S) surface proteins, respectively. ORF X encodes the secretary X protein.

[0213] The partially double-stranded HBV genome is converted by host factors to covalently closed circular DNA (cccDNA). The cccDNA is transcribed by a host RNA polymerase to produce viral mRNA including pre-genomic RNA (pgRNA). pgRNA is reversed transcribed by the HBV polymerase into genomic HBV DNA that can be converted into cccDNA, packaged into virions, or integrated into the host cell's genome (FIG. 2). cccDNA, a key component of the HBV life cycle, is a stable molecule responsible for chronic HBV infection. Editing of the HBV genome can disrupt the formation of cccDNA, thereby reducing the pathogenicity of the virus.

[0214] There are ten different HBV genotypes (A-J) (FIG. 3A). A “genotype” is characterized by <92% sequence identity with any other genome, and a sub-genotype is characterized by <96 to 92% sequence identity. HBV of genotype D is the most prevalent in the United States (FIG. 3A). Research models of HBV genotype D are available including viral stocks (e.g., genotype D, subgenotype ayw (Imquest)) and mouse models (e.g., humanized mouse model (Phoenixbio). Thus, in some embodiments, methods and compositions are provided that target HBV ORFs for editing. These compositions can comprise a nucleobase editor having a Cas9 or other nucleic acid programmable DNA binding protein domain and an adenosine or cytosine deaminase domain. In some embodiments, the base editor introduces one or more alterations into an HBV ORF. In some embodiments, the alteration results in a mutation in a conserved portion of an HBV protein. In particular embodiments, the alteration introduces one or more stop codons. Throughout the specification, the introduction of a stop codon, resulting in the premature termination of the protein is represented by the amino acid symbol, the amino acid position, and the term STOP (e.g., R87STOP indicates that the codon encoding Arginine at amino acid position 87 is replaced by a Stop codon). Advantageously, the methods of the present invention do not introduce double stranded breaks in the HBV genome.

[0215] The invention provides strategies for using base editing to treat chronic HBV (FIG. 3B). Described herein are screens for identifying guide RNAs that introduce stop codons or functional mutations into HBV genes or that identify gRNAs that generate abasic sites in superconserved regions of the HBV genome (FIG. 3C). Introducing stop condons into viral genes using the methods and compositions described herein can be accomplished without generating double strand breaks, thereby eliminating or reducing the risk of cutting host genetic material after HBV integrates into the host's genome. Additionally, the compositions employ a deaminase that is a natural HBV antiviral restriction factor. For example, inducing APOBEC cytodine deaminases with interferon alpha or Lymphotoxin R receptor (LTBR) promotes abasic site formation and cccDNA degradation (FIG. 3B). Furthermore, using a base editor without uracil glycosilase inhibitor domains can target cellular uracil glycosylase to cccDNA and promote its degradation.

[0216] Another screen provided identifies conserved gRNAs that can be used to generate abasic sites in cccDNA. Referring to FIG. 3D, 7 guide RNAs were identified that had greater than 20% editing efficiency when a lentivirus was used to introduce a base editor and gRNA (Lenti-HBV). The gRNAs targeting conserved regions are shown at FIG. 3E. Several gRNAs had at least 45% editing efficiency (FIGS. 3F and 3G).

[0217] In some aspects, methods and compositions are provided for editing HBV cccDNA with a base editor comprising a cytidine deaminase or adenosine deaminase domain. In one embodiment, a base editor comprises an APOBEC cytidine deaminase domain, a Cas9 domain, and, optionally, one or more uracil glycosylase inhibitor (UGI) domains (FIGS. 4A, 4B).

### Nucleobase Editor

[0218] Disclosed herein is a base editor or a nucleobase editor for editing, modifying or altering a target nucleotide sequence of a polynucleotide. Described herein is a nucleobase editor or a base editor comprising a polynucleotide programmable nucleotide binding domain and a nucleobase editing domain (e.g., adenosine deaminase, cytidine deaminase). A polynucleotide programmable nucleotide binding domain, when in conjunction with a bound guide polynucleotide (e.g., gRNA), can specifically bind to a target polynucleotide sequence (i.e., via complementary base pairing between bases of the bound guide nucleic acid and bases of the target polynucleotide sequence) and thereby localize the base editor to the target nucleic acid sequence desired to be edited. In some embodiments, the target polynucleotide sequence comprises single-stranded DNA or double-stranded DNA. In some embodiments, the target polynucleotide sequence comprises RNA. In some embodiments, the target polynucleotide sequence comprises a DNA-RNA hybrid.

### Polynucleotide Programmable Nucleotide Binding Domain

[0219] It should be appreciated that polynucleotide programmable nucleotide binding domains can also include nucleic acid programmable proteins that bind RNA. For example, the polynucleotide programmable nucleotide binding domain can be associated with a nucleic acid that guides the polynucleotide programmable nucleotide binding domain to an RNA. Other nucleic acid programmable DNA binding proteins are also within the scope of this disclosure, though they are not specifically listed in this disclosure.

[0220] A polynucleotide programmable nucleotide binding domain of a base editor can itself comprise one or more domains. For example, a polynucleotide programmable nucleotide binding domain can comprise one or more nuclease domains. In some embodiments, the nuclease domain of a polynucleotide programmable nucleotide binding domain can comprise an endonuclease or an exonuclease. Herein the term “exonuclease” refers to a protein or polypeptide capable of digesting a nucleic acid (e.g., RNA or DNA) from free ends, and the term “endonuclease” refers to a protein or polypeptide capable of catalyzing (e.g., cleaving) internal regions in a nucleic acid (e.g., DNA or RNA). In some embodiments, an endonuclease can cleave a single strand of a double-stranded nucleic acid. In some embodiments, an endonuclease can cleave both strands of a double-stranded nucleic acid molecule. In some embodiments a polynucleotide programmable nucleotide binding domain can be a deoxyribonuclease. In some embodiments a polynucleotide programmable nucleotide binding domain can be a ribonuclease.

[0221] In some embodiments, a nuclease domain of a polynucleotide programmable nucleotide binding domain can cut zero, one, or two strands of a target polynucleotide. In some cases, the polynucleotide programmable nucleotide binding domain can comprise a nickase domain. Herein the term “nickase” refers to a polynucleotide programmable nucleotide binding domain comprising a nuclease domain that is capable of cleaving only one strand of the two strands in a duplexed nucleic acid molecule (e.g., DNA). In some embodiments, a nickase can be derived from a fully catalytically active (e.g., natural) form of a polynucleotide programmable nucleotide binding domain by introducing one or more mutations into the active polynucleotide programmable nucleotide binding domain. For example, where a polynucleotide programmable nucleotide binding domain comprises a nickase domain derived from Cas9, the Cas9-derived nickase domain can include a D10A mutation and a histidine at position 840. In such cases, the residue H840 retains catalytic activity and can thereby cleave a single strand of the nucleic acid duplex. In another example, a Cas9-derived nickase domain can comprise an H840A mutation, while the amino acid residue at position 10 remains a D. In some embodiments, a nickase can be derived from a fully catalytically active (e.g., natural) form of a polynucleotide programmable nucleotide binding domain by removing all or a portion of a nuclease domain that is not required for the nickase activity. For example, where a polynucleotide programmable nucleotide binding domain comprises a nickase domain derived from Cas9, the Cas9-derived nickase domain can comprise a deletion of all or a portion of the RuvC domain or the HNH domain.

[0222] The amino acid sequence of an exemplary catalytically active Cas9 is as follows:

[sequence omitted]

[0223] A base editor comprising a polynucleotide programmable nucleotide binding domain comprising a nickase domain is thus able to generate a single-strand DNA break (nick) at a specific polynucleotide target sequence (e.g., determined by the complementary sequence of a bound guide nucleic acid). In some embodiments, the strand of a nucleic acid duplex target polynucleotide sequence that is cleaved by a base editor comprising a nickase domain (e.g., Cas9-derived nickase domain) is the strand that is not edited by the base editor (i.e., the strand that is cleaved by the base editor is opposite to a strand comprising a base to be edited). In other embodiments, a base editor comprising a nickase domain (e.g., Cas9-derived nickase domain) can cleave the strand of a DNA molecule which is being targeted for editing. In such cases, the non-targeted strand is not cleaved.

[0224] Also provided herein are base editors comprising a polynucleotide programmable nucleotide binding domain which is catalytically dead (i.e., incapable of cleaving a target polynucleotide sequence). Herein the terms “catalytically dead” and “nuclease dead” are used interchangeably to refer to a polynucleotide programmable nucleotide binding domain which has one or more mutations and/or deletions resulting in its inability to cleave a strand of a nucleic acid. In some embodiments, a catalytically dead polynucleotide programmable nucleotide binding domain base editor can lack nuclease activity as a result of specific point mutations in one or more nuclease domains. For example, in the case of a base editor comprising a Cas9 domain, the Cas9 can comprise both a D10A mutation and an H840A mutation. Such mutations inactivate both nuclease domains, thereby resulting in the loss of nuclease activity. In other embodiments, a catalytically dead polynucleotide programmable nucleotide binding domain can comprise one or more deletions of all or a portion of a catalytic domain (e.g., RuvC1 and/or HNH domains). In further embodiments, a catalytically dead polynucleotide programmable nucleotide binding domain comprises a point mutation (e.g., D10A or H840A) as well as a deletion of all or a portion of a nuclease domain.

[0225] Also contemplated herein are mutations capable of generating a catalytically dead polynucleotide programmable nucleotide binding domain from a previously functional version of the polynucleotide programmable nucleotide binding domain. For example, in the case of catalytically dead Cas9 (“dCas9”), variants having mutations other than D10A and H840A are provided, which result in nuclease inactivated Cas9. Such mutations, by way of example, include other amino acid substitutions at D10 and H840, or other substitutions within the nuclease domains of Cas9 (e.g., substitutions in the HNH nuclease subdomain and/or the RuvC1 subdomain). Additional suitable nuclease-inactive dCas9 domains can be apparent to those of skill in the art based on this disclosure and knowledge in the field, and are within the scope of this disclosure. Such additional exemplary suitable nuclease-inactive Cas9 domains include, but are not limited to, D10A/H840A, D10A/D839A/H840A, and D10A/D839A/H840A/N863A mutant domains (See, e.g., Prashant et al., CAS9 transcriptional activators for target specificity screening and paired nickases for cooperative genome engineering. Nature Biotechnology. 2013; 31(9): 833-838, the entire contents of which are incorporated herein by reference).

[0226] Non-limiting examples of a polynucleotide programmable nucleotide binding domain which can be incorporated into a base editor include a CRISPR protein-derived domain, a restriction nuclease, a meganuclease, TAL nuclease (TALEN), and a zinc finger nuclease (ZFN). In some cases, a base editor comprises a polynucleotide programmable nucleotide binding domain comprising a natural or modified protein or portion thereof which via a bound guide nucleic acid is capable of binding to a nucleic acid sequence during CRISPR (i.e., Clustered Regularly Interspaced Short Palindromic Repeats)-mediated modification of a nucleic acid. Such a protein is referred to herein as a “CRISPR protein”. Accordingly, disclosed herein is a base editor comprising a polynucleotide programmable nucleotide binding domain comprising all or a portion of a CRISPR protein (i.e. a base editor comprising as a domain all or a portion of a CRISPR protein, also referred to as a “CRISPR protein-derived domain” of the base editor). A CRISPR protein-derived domain incorporated into a base editor can be modified compared to a wild-type or natural version of the CRISPR protein. For example, as described below a CRISPR protein-derived domain can comprise one or more mutations, insertions, deletions, rearrangements and/or recombinations relative to a wild-type or natural version of the CRISPR protein.

[0227] CRISPR is an adaptive immune system that provides protection against mobile genetic elements (viruses, transposable elements and conjugative plasmids). CRISPR clusters contain spacers, sequences complementary to antecedent mobile elements, and target invading nucleic acids. CRISPR clusters are transcribed and processed into CRISPR RNA (crRNA). In type II CRISPR systems, correct processing of pre-crRNA requires a trans-encoded small RNA (tracrRNA), endogenous ribonuclease 3 (rnc) and a Cas9 protein. The tracrRNA serves as a guide for ribonuclease 3-aided processing of pre-crRNA. Subsequently, Cas9/crRNA/tracrRNA endonucleolytically cleaves linear or circular dsDNA target complementary to the spacer. The target strand not complementary to crRNA is first cut endonucleolytically, and then trimmed 3′-5′ exonucleolytically. In nature, DNA-binding and cleavage typically requires protein and both RNAs. However, single guide RNAs (“sgRNA”, or simply “gNRA”) can be engineered so as to incorporate aspects of both the crRNA and tracrRNA into a single RNA species. See, e.g., Jinek M., Chylinski K., Fonfara I., Hauer M., Doudna J. A., Charpentier E. Science 337:816-821(2012), the entire contents of which is hereby incorporated by reference. Cas9 recognizes a short motif in the CRISPR repeat sequences (the PAM or protospacer adjacent motif) to help distinguish self-versus-non-self.

[0228] In some embodiments, the methods described herein can utilize an engineered Cas protein. A guide RNA (gRNA) is a short synthetic RNA composed of a scaffold sequence necessary for Cas-binding and a user-defined ˜20 nucleotide spacer that defines the genomic (or polynucleotide, e.g., DNA or RNA) target to be modified. Thus, a skilled artisan can change the genomic or polynucleotide target of the Cas protein by changing the target sequence present in the gRNA. The specificity of the Cas protein is partially determined by how specific the gRNA targeting sequence is for the genomic polynucleotide target sequence compared to the rest of the genome.

[0229] In some embodiments, the gRNA scaffold sequence is as follows: GUUUUAGAGC UAGAAAUAGC AAGUUAAAAU AAGGCUAGUC CGUUAUCAAC UUGAAAAAGU GGCACCGAGU CGGUGCUUUU.

[0230] In an embodiment, the RNA scaffold comprises a stem loop. In an embodiment, the RNA scaffold comprises the nucleic acid sequence:

GUUUUUGUACUCUCAAGAUUUAAGUAACUGUACAACGAAACUUACACAGU
UACUUAAAUCUUGCAGAAGCUACAAAGAUAAGGCUUCAUGCCGAAAUCAA
CACCCUGUCAUUUUAUGGCAGGGU

G. In an embodiment, the RNA scaffold comprises the nucleic acid sequence:

GUUUUAGAGCUAGAAAUAGCAAGUUAAAAUAAGGCUAGUCCGUUAUCAAC
UUGAAAAAGUGGCACCGAGUCGGUGCUUUU.

[0231] In an embodiment, an S. pyrogenes sgRNA scaffold polynucleotide sequence is as follows:

GUUUUAGAGCUAGAAAUAGCAAGUUAAAAUAAGGCUAGUCCGUUAUCAAC
UUGAAAAAGUGGCACCGAGUCGGUGC.

[0232] In an embodiment, an S. aureus sgRNA scaffold polynucleotide sequence is as follows:

GUUUUAGUACUCUGUAAUGAAAAUUACAGAAUCUACUAAAACAAGGCAAA
AUGCCGUGUUUAUCUCGUCAACUUGUUGGCGAGA.

[0233] In an embodiment, a BhCas12b sgRNA scaffold has the following polynucleotide sequence:

GUUCUGTCUUUUGGUCAGGACAACCGUCUAGCUAUAAGUGCUGCAGGGUG
UGAGAAACUCCUAUUGCUGGACGAUGUCUCUUACGAGGCAUUAGCAC.

[0234] In an embodiment, a BvCas12b sgRNA scaffold has the following polynucleotide sequence:

GACCUAUAGGGUCAAUGAAUCUGUGCGUGUGCCAUAAGUAAUUAAAAAUU
ACCCACCACAGGAGCACCUGAAAACAGGUGCUUGGCAC.

[0235] In some embodiments, a CRISPR protein-derived domain incorporated into a base editor is an endonuclease (e.g., deoxyribonuclease or ribonuclease) capable of binding a target polynucleotide when in conjunction with a bound guide nucleic acid. In some embodiments, a CRISPR protein-derived domain incorporated into a base editor is a nickase capable of binding a target polynucleotide when in conjunction with a bound guide nucleic acid. In some embodiments, a CRISPR protein-derived domain incorporated into a base editor is a catalytically dead domain capable of binding a target polynucleotide when in conjunction with a bound guide nucleic acid. In some embodiments, a target polynucleotide bound by a CRISPR protein derived domain of a base editor is DNA. In some embodiments, a target polynucleotide bound by a CRISPR protein-derived domain of a base editor is RNA. Cas proteins that can be used herein include class 1 and class 2. Non-limiting examples of Cas proteins include Cas1, Cas1B, Cas2, Cas3, Cas4, Cas5, Cas5d, Cas5t, Cas5h, Cas5a, Cas6, Cas7, Cas8, Cas9 (also known as Csn1 or Csx12), Cas10, Csy1, Csy2, Csy3, Csy4, Cse1, Cse2, Cse3, Cse4, Cse5e, Csc1, Csc2, Csa5, Csn1, Csn2, Csm1, Csm2, Csm3, Csm4, Csm5, Csm6, Cmr1, Cmr3, Cmr4, Cmr5, Cmr6, Csb1, Csb2, Csb3, Csx17, Csx14, Csx10, Csx16, CsaX, Csx3, Csx1, Csx1S, Csf1, Csf2, CsO, Csf4, Csd1, Csd2, Cst1, Cst2, Csh1, Csh2, Csa1, Csa2, Csa3, Csa4, Csa5, Cas12a/Cpf1, Cas12b/C2c1, Cas12c/C2c3, Cas12d/CasY, Cas12e/CasX, Cas12g, Cas12h, and Cas12i, CARF, DinG, homologues thereof, or modified versions thereof. An unmodified CRISPR enzyme can have DNA cleavage activity, such as Cas9, which has two functional endonuclease domains: RuvC and HNH. A CRISPR enzyme can direct cleavage of one or both strands at a target sequence, such as within a target sequence and/or within a complement of a target sequence. For example, a CRISPR enzyme can direct cleavage of one or both strands within about 1, 2, 3, 4, 5, 6, 7, 8, 9, 10, 15, 20, 25, 50, 100, 200, 500, or more base pairs from the first or last nucleotide of a target sequence.

[0236] A vector that encodes a CRISPR enzyme that is mutated to with respect, to a corresponding wild-type enzyme such that the mutated CRISPR enzyme lacks the ability to cleave one or both strands of a target polynucleotide containing a target sequence can be used. Cas9 can refer to a polypeptide with at least or at least about 50%, 60%, 70%, 80%, 90%, 91%, 92%, 93%, 94%, 95%, 96%, 97%, 98%, 99%, or 100% sequence identity and/or sequence homology to a wild type exemplary Cas9 polypeptide (e.g., Cas9 from S. pyogenes). Cas9 can refer to a polypeptide with at most or at most about 50%, 60%, 70%, 80%, 90%, 91%, 92%, 93%, 94%, 95%, 96%, 97%, 98%, 99%, or 100% sequence identity and/or sequence homology to a wild type exemplary Cas9 polypeptide (e.g., from S. pyogenes). Cas9 can refer to the wild type or a modified form of the Cas9 protein that can comprise an amino acid change such as a deletion, insertion, substitution, variant, mutation, fusion, chimera, or any combination thereof.

[0237] In some embodiments, a CRISPR protein-derived domain of a base editor can include all or a portion of Cas9 from Corynebacterium ulcerans (NCBI Refs: NC_015683.1, NC_017317.1); Corynebacterium diphtheria (NCBI Refs: NC_016782.1, NC_016786.1); Spiroplasma syrphidicola (NCBI Ref: NC_021284.1); Prevotella intermedia (NCBI Ref: NC_017861.1); Spiroplasma taiwanense (NCBI Ref: NC_021846.1); Streptococcus iniae (NCBI Ref: NC_021314.1); Belliella baltica (NCBI Ref: NC_018010.1); Psychroflexus torquis (NCBI Ref: NC_018721.1); Streptococcus thermophilus (NCBI Ref: YP_820832.1); Listeria innocua (NCBI Ref: NP_472073.1); Campylobacter jejuni (NCBI Ref: YP_002344900.1); Neisseria meningitidis (NCBI Ref: YP_002342100.1), Streptococcus pyogenes, or Staphylococcus aureus.

### Cas9 Domains of Nucleobase Editors

[0238] Cas9 nuclease sequences and structures are well known to those of skill in the art (See, e.g., “Complete genome sequence of an M1 strain of Streptococcus pyogenes.” Ferretti et al., J. J., McShan W. M., Ajdic D. J., Savic D. J., Savic G., Lyon K., Primeaux C, Sezate S., Suvorov A. N., Kenton S., Lai H. S., Lin S. P., Qian Y., Jia H. G., Najar F. Z., Ren Q., Zhu H., Song L., White J., Yuan X., Clifton S. W., Roe B. A., McLaughlin R. E., Proc. Natl. Acad. Sci. U.S.A. 98:4658-4663(2001); “CRISPR RNA maturation by trans-encoded small RNA and host factor RNase III.” Deltcheva E., Chylinski K., Sharma C. M., Gonzales K., Chao Y., Pirzada Z. A., Eckert M. R., Vogel J., Charpentier E., Nature 471:602-607(2011); and “A programmable dual-RNA-guided DNA endonuclease in adaptive bacterial immunity.” Jinek M., Chylinski K., Fonfara I., Hauer M., Doudna J. A., Charpentier E. Science 337:816-821(2012), the entire contents of each of which are incorporated herein by reference). Cas9 orthologs have been described in various species, including, but not limited to, S. pyogenes and S. thermophilus. Additional suitable Cas9 nucleases and sequences will be apparent to those of skill in the art based on this disclosure, and such Cas9 nucleases and sequences include Cas9 sequences from the organisms and loci disclosed in Chylinski, Rhun, and Charpentier, “The tracrRNA and Cas9 families of type II CRISPR-Cas immunity systems” (2013) RNA Biology 10:5, 726-737; the entire contents of which are incorporated herein by reference.

[0239] In some aspects, a nucleic acid programmable DNA binding protein (napDNAbp) is a Cas9 domain. Non-limiting, exemplary Cas9 domains are provided herein. The Cas9 domain may be a nuclease active Cas9 domain, a nuclease inactive Cas9 domain, or a Cas9 nickase. In some embodiments, the Cas9 domain is a nuclease active domain. For example, the Cas9 domain may be a Cas9 domain that cuts both strands of a duplexed nucleic acid (e.g., both strands of a duplexed DNA molecule). In some embodiments, the Cas9 domain comprises any one of the amino acid sequences as set forth herein. In some embodiments the Cas9 domain comprises an amino acid sequence that is at least 60%, at least 65%, at least 70%, at least 75%, at least 80%, at least 85%, at least 90%, at least 95%, at least 96%, at least 97%, at least 98%, at least 99%, or at least 99.5% identical to any one of the amino acid sequences set forth herein. In some embodiments, the Cas9 domain comprises an amino acid sequence that has 1, 2, 3, 4, 5, 6, 7, 8, 9, 10, 11, 12, 13, 14, 15, 16, 17, 18, 19, 20, 21, 22, 21, 24, 25, 26, 27, 28, 29, 30, 31, 32, 33, 34, 35, 36, 37, 38, 39, 40, 41, 42, 43, 44, 45, 46, 47, 48, 49, 50 or more mutations compared to any one of the amino acid sequences set forth herein. In some embodiments, the Cas9 domain comprises an amino acid sequence that has at least 10, at least 15, at least 20, at least 30, at least 40, at least 50, at least 60, at least 70, at least 80, at least 90, at least 100, at least 150, at least 200, at least 250, at least 300, at least 350, at least 400, at least 500, at least 600, at least 700, at least 800, at least 900, at least 1000, at least 1100, or at least 1200 identical contiguous amino acid residues as compared to any one of the amino acid sequences set forth herein.

[0240] In some embodiments, proteins comprising fragments of Cas9 are provided. For example, in some embodiments, a protein comprises one of two Cas9 domains: (1) the gRNA binding domain of Cas9; or (2) the DNA cleavage domain of Cas9. In some embodiments, proteins comprising Cas9 or fragments thereof are referred to as “Cas9 variants.” A Cas9 variant shares homology to Cas9, or a fragment thereof. For example, a Cas9 variant is at least about 70% identical, at least about 80% identical, at least about 90% identical, at least about 95% identical, at least about 96% identical, at least about 97% identical, at least about 98% identical, at least about 99% identical, at least about 99.5% identical, or at least about 99.9% identical to wild type Cas9. In some embodiments, the Cas9 variant may have 1, 2, 3, 4, 5, 6, 7, 8, 9, 10, 11, 12, 13, 14, 15, 16, 17, 18, 19, 20, 21, 22, 21, 24, 25, 26, 27, 28, 29, 30, 31, 32, 33, 34, 35, 36, 37, 38, 39, 40, 41, 42, 43, 44, 45, 46, 47, 48, 49, 50 or more amino acid changes compared to wild type Cas9. In some embodiments, the Cas9 variant comprises a fragment of Cas9 (e.g., a gRNA binding domain or a DNA-cleavage domain), such that the fragment is at least about 70% identical, at least about 80% identical, at least about 90% identical, at least about 95% identical, at least about 96% identical, at least about 97% identical, at least about 98% identical, at least about 99% identical, at least about 99.5% identical, or at least about 99.9% identical to the corresponding fragment of wild type Cas9. In some embodiments, the fragment is at least 30%, at least 35%, at least 40%, at least 45%, at least 50%, at least 55%, at least 60%, at least 65%, at least 70%, at least 75%, at least 80%, at least 85%, at least 90%, at least 95% identical, at least 96%, at least 97%, at least 98%, at least 99%, or at least 99.5% of the amino acid length of a corresponding wild type Cas9. In some embodiments, the fragment is at least 100 amino acids in length. In some embodiments, the fragment is at least 100, 150, 200, 250, 300, 350, 400, 450, 500, 550, 600, 650, 700, 750, 800, 850, 900, 950, 1000, 1050, 1100, 1150, 1200, 1250, or at least 1300 amino acids in length.

[0241] In some embodiments, Cas9 fusion proteins as provided herein comprise the full-length amino acid sequence of a Cas9 protein, e.g., one of the Cas9 sequences provided herein. In other embodiments, however, fusion proteins as provided herein do not comprise a full-length Cas9 sequence, but only one or more fragments thereof. Exemplary amino acid sequences of suitable Cas9 domains and Cas9 fragments are provided herein, and additional suitable sequences of Cas9 domains and fragments will be apparent to those of skill in the art.

[0242] A Cas9 protein can associate with a guide RNA that guides the Cas9 protein to a specific DNA sequence that has complementary to the guide RNA. In some embodiments, the polynucleotide programmable nucleotide binding domain is a Cas9 domain, for example a nuclease active Cas9, a Cas9 nickase (nCas9), or a nuclease inactive Cas9 (dCas9). Examples of nucleic acid programmable DNA binding proteins include, without limitation, Cas9 (e.g., dCas9 and nCas9), CasX, CasY, Cpf1, Cas12b/C2C1, and Cas12c/C2C3.

[0243] In some embodiments, wild type Cas9 corresponds to Cas9 from Streptococcus pyogenes (NCBI Reference Sequence: NC_017053.1, nucleotide and amino acid sequences as follows).

ATGGATAAGAAATACTCAATAGGCTTAGATATCGGCACAAATAGCGTCGGATGGGCGGTGAT
CACTGATGATTATAAGGTTCCGTCTAAAAAGTTCAAGGTTCTGGGAAATACAGACCGCCACA
GTATCAAAAAAAATCTTATAGGGGCTCTTTTATTTGGCAGTGGAGAGACAGCGGAAGCGACT
CGTCTCAAACGGACAGCTCGTAGAAGGTATACACGTCGGAAGAATCGTATTTGTTATCTACA
GGAGATTTTTTCAAATGAGATGGCGAAAGTAGATGATAGTTTCTTTCATCGACTTGAAGAGT
CTTTTTTGGTGGAAGAAGACAAGAAGCATGAACGTCATCCTATTTTTGGAAATATAGTAGAT
GAAGTTGCTTATCATGAGAAATATCCAACTATCTATCATCTGCGAAAAAAATTGGCAGATIC
TACTGATAAAGCGGATTTGCGCTTAATCTATTTGGCCTTAGCGCATATGATTAAGTTTCGTG
GTCATTTTTTGATTGAGGGAGATTTAAATCCTGATAATAGTGATGTGGACAAACTATTTATC
CAGTTGGTACAAATCTACAATCAATTATTTGAAGAAAACCCTATTAACGCAAGTAGAGTAGA
TGCTAAAGCGATTCTTTCTGCACGATTGAGTAAATCAAGACGATTAGAAAATCTCATTGCTC
AGCTCCCCGGTGAGAAGAGAAATGGCTTGTTTGGGAATCTCATTGCTTTGTCATTGGGATTG
ACCCCTAATTTTAAATCAAATTTTGATTTGGCAGAAGATGCTAAATTACAGCTTTCAAAAGA
TACTTACGATGATGATTTAGATAATTTATTGGCGCAAATTGGAGATCAATATGCTGATTTGT
TTTTGGCAGCTAAGAATTTATCAGATGCTATTTTACTTTCAGATATCCTAAGAGTAAATAGT
GAAATAACTAAGGCTCCCCTATCAGCTTCAATGATTAAGCGCTACGATGAACATCATCAAGA
CTTGACTCTTTTAAAAGCTTTAGTTCGACAACAACTTCCAGAAAAGTATAAAGAAATCTTTT
TTGATCAATCAAAAAACGGATATGCAGGTTATATTGATGGGGGAGCTAGCCAAGAAGAATTT
TATAAATTTATCAAACCAATTTTAGAAAAAATGGATGGTACTGAGGAATTATTGGTGAAACT
AAATCGTGAAGATTTGCTGCGCAAGCAACGGACCTTTGACAACGGCTCTATTCCCCATCAAA
TTCACTTGGGTGAGCTGCATGCTATTTTGAGAAGACAAGAAGACTTTTATCCATTTTTAAAA
GACAATCGTGAGAAGATTGAAAAAATCTTGACTTTTCGAATTCCTTATTATGTTGGTCCATT
GGCGCGTGGCAATAGTCGTTTTGCATGGATGACTCGGAAGTCTGAAGAAACAATTACCCCAT
GGAATTTTGAAGAAGTTGTCGATAAAGGTGCTTCAGCTCAATCATTTATTGAACGCATGACA
AACTTTGATAAAAATCTTCCAAATGAAAAAGTACTACCAAAACATAGTTTGCTTTATGAGTA
TTTTACGGTTTATAACGAATTGACAAAGGTCAAATATGTTACTGAGGGAATGCGAAAACCAG
CATTTCTTTCAGGTGAACAGAAGAAAGCCATTGTTGATTTACTCTTCAAAACAAATCGAAAA
GTAACCGTTAAGCAATTAAAAGAAGATTATTTCAAAAAAATAGAATGTTTTGATAGTGTTGA
AATTTCAGGAGTTGAAGATAGATTTAATGCTTCATTAGGCGCCTACCATGATTTGCTAAAAA
TTATTAAAGATAAAGATTTTTTGGATAATGAAGAAAATGAAGATATCTTAGAGGATATTGTT
TTAACATTGACCTTATTTGAAGATAGGGGGATGATTGAGGAAAGACTTAAAACATATGCTCA
CCTCTTTGATGATAAGGTGATGAAACAGCTTAAACGTCGCCGTTATACTGGTTGGGGACGTT
TGTCTCGAAAATTGATTAATGGTATTAGGGATAAGCAATCTGGCAAAACAATATTAGATTTT
TTGAAATCAGATGGTTTTGCCAATCGCAATTTTATGCAGCTGATCCATGATGATAGTTTGAC
ATTTAAAGAAGATATTCAAAAAGCACAGGTGTCTGGACAAGGCCATAGTTTACATGAACAGA
TTGCTAACTTAGCTGGCAGTCCTGCTATTAAAAAAGGTATTTTACAGACTGTAAAAATTGTT
GATGAACTGGTCAAAGTAATGGGGCATAAGCCAGAAAATATCGTTATTGAAATGGCACGTGA
AAATCAGACAACTCAAAAGGGCCAGAAAAATTCGCGAGAGCGTATGAAACGAATCGAAGAAG
GTATCAAAGAATTAGGAAGTCAGATTCTTAAAGAGCATCCTGTTGAAAATACTCAATTGCAA
AATGAAAAGCTCTATCTCTATTATCTACAAAATGGAAGAGACATGTATGTGGACCAAGAATT
AGATATTAATCGTTTAAGTGATTATGATGTCGATCACATTGTTCCACAAAGTTTCATTAAAG
ACGATTCAATAGACAATAAGGTACTAACGCGTTCTGATAAAAATCGTGGTAAATCGGATAAC
GTTCCAAGTGAAGAAGTAGTCAAAAAGATGAAAAACTATTGGAGACAACTTCTAAACGCCAA
GTTAATCACTCAACGTAAGTTTGATAATTTAACGAAAGCTGAACGTGGAGGTTTGAGTGAAC
TTGATAAAGCTGGTTTTATCAAACGCCAATTGGTTGAAACTCGCCAAATCACTAAGCATGTG
GCACAAATTTTGGATAGTCGCATGAATACTAAATACGATGAAAATGATAAACTTATTCGAGA
GGTTAAAGTGATTACCTTAAAATCTAAATTAGTTTCTGACTTCCGAAAAGATTTCCAATTCT
ATAAAGTACGTGAGATTAACAATTACCATCATGCCCATGATGCGTATCTAAATGCCGTCGTT
GGAACTGCTTTGATTAAGAAATATCCAAAACTTGAATCGGAGTTTGTCTATGGTGATTATAA
AGTTTATGATGTTCGTAAAATGATTGCTAAGTCTGAGCAAGAAATAGGCAAAGCAACCGCAA
AATATTTCTTTTACTCTAATATCATGAACTTCTTCAAAACAGAAATTACACTTGCAAATGGA
GAGATTCGCAAACGCCCTCTAATCGAAACTAATGGGGAAACTGGAGAAATTGTCTGGGATAA
AGGGCGAGATTTTGCCACAGTGCGCAAAGTATTGTCCATGCCCCAAGTCAATATTGTCAAGA
AAACAGAAGTACAGACAGGCGGATTCTCCAAGGAGTCAATTTTACCAAAAAGAAATTCGGAC
AAGCTTATTGCTCGTAAAAAAGACTGGGATCCAAAAAAATATGGTGGTTTTGATAGTCCAAC
GGTAGCTTATTCAGTCCTAGTGGTTGCTAAGGTGGAAAAAGGGAAATCGAAGAAGTTAAAAT
CCGTTAAAGAGTTACTAGGGATCACAATTATGGAAAGAAGTTCCTTTGAAAAAAATCCGATT
GACTTTTTAGAAGCTAAAGGATATAAGGAAGTTAAAAAAGACTTAATCATTAAACTACCTAA
ATATAGTCTTTTTGAGTTAGAAAACGGTCGTAAACGGATGCTGGCTAGTGCCGGAGAATTAC
AAAAAGGAAATGAGCTGGCTCTGCCAAGCAAATATGTGAATTTTTTATATTTAGCTAGTCAT
TATGAAAAGTTGAAGGGTAGTCCAGAAGATAACGAACAAAAACAATTGTTTGTGGAGCAGCA
TAAGCATTATTTAGATGAGATTATTGAGCAAATCAGTGAATTTTCTAAGCGTGTTATTTTAG
CAGATGCCAATTTAGATAAAGTTCTTAGTGCATATAACAAACATAGAGACAAACCAATACGT
GAACAAGCAGAAAATATTATTCATTTATTTACGTTGACGAATCTTGGAGCTCCCGCTGCTTT
TAAATATTTTGATACAACAATTGATCGTAAACGATATACGTCTACAAAAGAAGTTTTAGATG
CCACTCTTATCCATCAATCCATCACTGGTCTTTATGAAACACGCATTGATTTGAGTCAGCTA
GGAGGTGACTGA
MDKKYSIGLDIGTNSVGWAVITDDYKVPSKKFKVLGNTDRHSIKKNLIGALLFGSGETAEAT
RLKRTARRRYTRRKNRICYLQEIFSNEMAKVDDSFFHRLEESFLVEEDKKHERHPIFGNIVD
EVAYHEKYPTIYHLRKKLADSTDKADLRLIYLALAHMIKFRGHFLIEGDLNPDNSDVDKLFI
QLVQIYNQLFEENPINASRVDAKAILSARLSKSRRLENLIAQLPGEKRNGLFGNLIALSLGL
TPNFKSNFDLAEDAKLQLSKDTYDDDLDNLLAQIGDQYADLFLAAKNLSDAILLSDILRVNS
EITKAPLSASMIKRYDEHHQDLTLLKALVRQQLPEKYKEIFFDQSKNGYAGYIDGGASQEEF
YKFIKPILEKMDGTEELLVKLNREDLLRKQRTFDNGSIPHQIHLGELHAILRRQEDFYPFLK
DNREKIEKILTFRIPYYVGPLARGNSRFAWMTRKSEETITPWNFEEVVDKGASAQSFIERMT
NFDKNLPNEKVLPKHSLLYEYFTVYNELTKVKYVTEGMRKPAFLSGEQKKAIVDLLFKTNRK
VTVKQLKEDYFKKIECFDSVEISGVEDRFNASLGAYHDLLKIIKDKDFLDNEENEDILEDIV
LTLTLFEDRGMIEERLKTYAHLFDDKVMKQLKRRRYTGWGRLSRKLINGIRDKQSGKTILDF
LKSDGFANRNFMQLIHDDSLTFKEDIQKAQVSGQGHSLHEQIANLAGSPAIKKGILQTVKIV
DELVKVMGHKPENIVIEMARENQTTQKGQKNSRERMKRIEEGIKELGSQILKEHPVENTQLQ
NEKLYLYYLQNGRDMYVDQELDINRLSDYDVDHIVPQSFIKDDSIDNKVLTRSDKNRGKSDN
VPSEEVVKKMKNYWRQLLNAKLITQRKFDNLTKAERGGLSELDKAGFIKRQLVETRQITKHV
AQILDSRMNTKYDENDKLIREVKVITLKSKLVSDFRKDFQFYKVREINNYHHAHDAYLNAVV
GTALIKKYPKLESEFVYGDYKVYDVRKMIAKSEQEIGKATAKYFFYSNIMNFFKTEITLANG
EIRKRPLIETNGETGEIVWDKGRDFATVRKVLSMPQVNIVKKTEVQTGGFSKESILPKRNSD
KLIARKKDWDPKKYGGFDSPTVAYSVLVVAKVEKGKSKKLKSVKELLGITIMERSSFEKNPI
DFLEAKGYKEVKKDLIIKLPKYSLFELENGRKRMLASAGELQKGNELALPSKYVNFLYLASH
YEKLKGSPEDNEQKQLFVEQHKHYLDEIIEQISEFSKRVILADANLDKVLSAYNKHRDKPIR
EQAENIIHLFTLTNLGAPAAFKYFDTTIDRKRYTSTKEVLDATLIHQSITGLYETRIDLSQL
GGD
(single underline: HNH domain; double underline: RuvC domain)

[0244] In some embodiments, wild type Cas9 corresponds to, or comprises the following nucleotide and/or amino acid sequences:

ATGGATAAAAAGTATTCTATTGGTTTAGACATCGGCACTAATTCCGTTGGATGGGCTGTCAT
AACCGATGAATACAAAGTACCTTCAAAGAAATTTAAGGTGTTGGGGAACACAGACCGTCATT
CGATTAAAAAGAATCTTATCGGTGCCCTCCTATTCGATAGTGGCGAAACGGCAGAGGCGACT
CGCCTGAAACGAACCGCTCGGAGAAGGTATACACGTCGCAAGAACCGAATATGTTACTTACA
AGAAATTTTTAGCAATGAGATGGCCAAAGTTGACGATTCTTTCTTTCACCGTTTGGAAGAGT
CCTTCCTTGTCGAAGAGGACAAGAAACATGAACGGCACCCCATCTTTGGAAACATAGTAGAT
GAGGTGGCATATCATGAAAAGTACCCAACGATTTATCACCTCAGAAAAAAGCTAGTTGACTC
AACTGATAAAGCGGACCTGAGGTTAATCTACTTGGCTCTTGCCCATATGATAAAGTTCCGTG
GGCACTTTCTCATTGAGGGTGATCTAAATCCGGACAACTCGGATGTCGACAAACTGTTCATC
CAGTTAGTACAAACCTATAATCAGTTGTTTGAAGAGAACCCTATAAATGCAAGTGGCGTGGA
TGCGAAGGCTATTCTTAGCGCCCGCCTCTCTAAATCCCGACGGCTAGAAAACCTGATCGCAC
AATTACCCGGAGAGAAGAAAAATGGGTTGTTCGGTAACCTTATAGCGCTCTCACTAGGCCTG
ACACCAAATTTTAAGTCGAACTTCGACTTAGCTGAAGATGCCAAATTGCAGCTTAGTAAGGA
CACGTACGATGACGATCTCGACAATCTACTGGCACAAATTGGAGATCAGTATGCGGACTTAT
TTTTGGCTGCCAAAAACCTTAGCGATGCAATCCTCCTATCTGACATACTGAGAGTTAATACT
GAGATTACCAAGGCGCCGTTATCCGCTTCAATGATCAAAAGGTACGATGAACATCACCAAGA
CTTGACACTTCTCAAGGCCCTAGTCCGTCAGCAACTGCCTGAGAAATATAAGGAAATATTCT
TTGATCAGTCGAAAAACGGGTACGCAGGTTATATTGACGGCGGAGCGAGTCAAGAGGAATTC
TACAAGTTTATCAAACCCATATTAGAGAAGATGGATGGGACGGAAGAGTTGCTTGTAAAACT
CAATCGCGAAGATCTACTGCGAAAGCAGCGGACTTTCGACAACGGTAGCATTCCACATCAAA
TCCACTTAGGCGAATTGCATGCTATACTTAGAAGGCAGGAGGATTTTTATCCGTTCCTCAAA
GACAATCGTGAAAAGATTGAGAAAATCCTAACCTTTCGCATACCTTACTATGTGGGACCCCT
GGCCCGAGGGAACTCTCGGTTCGCATGGATGACAAGAAAGTCCGAAGAAACGATTACTCCAT
GGAATTTTGAGGAAGTTGTCGATAAAGGTGCGTCAGCTCAATCGTTCATCGAGAGGATGACC
AACTTTGACAAGAATTTACCGAACGAAAAAGTATTGCCTAAGCACAGTTTACTTTACGAGTA
TTTCACAGTGTACAATGAACTCACGAAAGTTAAGTATGTCACTGAGGGCATGCGTAAACCCG
CCTTTCTAAGCGGAGAACAGAAGAAAGCAATAGTAGATCTGTTATTCAAGACCAACCGCAAA
GTGACAGTTAAGCAATTGAAAGAGGACTACTTTAAGAAAATTGAATGCTTCGATTCTGTCGA
GATCTCCGGGGTAGAAGATCGATTTAATGCGTCACTTGGTACGTATCATGACCTCCTAAAGA
TAATTAAAGATAAGGACTTCCTGGATAACGAAGAGAATGAAGATATCTTAGAAGATATAGTG
TTGACTCTTACCCTCTTTGAAGATCGGGAAATGATTGAGGAAAGACTAAAAACATACGCTCA
CCTGTTCGACGATAAGGTTATGAAACAGTTAAAGAGGCGTCGCTATACGGGCTGGGGACGAT
TGTCGCGGAAACTTATCAACGGGATAAGAGACAAGCAAAGTGGTAAAACTATTCTCGATTTT
CTAAAGAGCGACGGCTTCGCCAATAGGAACTTTATGCAGCTGATCCATGATGACTCTTTAAC
CTTCAAAGAGGATATACAAAAGGCACAGGTTTCCGGACAAGGGGACTCATTGCACGAACATA
TTGCGAATCTTGCTGGTTCGCCAGCCATCAAAAAGGGCATACTCCAGACAGTCAAAGTAGTG
GATGAGCTAGTTAAGGTCATGGGACGTCACAAACCGGAAAACATTGTAATCGAGATGGCACG
CGAAAATCAAACGACTCAGAAGGGGCAAAAAAACAGTCGAGAGCGGATGAAGAGAATAGAAG
AGGGTATTAAAGAACTGGGCAGCCAGATCTTAAAGGAGCATCCTGTGGAAAATACCCAATTG
CAGAACGAGAAACTTTACCTCTATTACCTACAAAATGGAAGGGACATGTATGTTGATCAGGA
ACTGGACATAAACCGTTTATCTGATTACGACGTCGATCACATTGTACCCCAATCCTTTTTGA
AGGACGATTCAATCGACAATAAAGTGCTTACACGCTCGGATAAGAACCGAGGGAAAAGTGAC
AATGTTCCAAGCGAGGAAGTCGTAAAGAAAATGAAGAACTATTGGCGGCAGCTCCTAAATGC
GAAACTGATAACGCAAAGAAAGTTCGATAACTTAACTAAAGCTGAGAGGGGTGGCTTGTCTG
AACTTGACAAGGCCGGATTTATTAAACGTCAGCTCGTGGAAACCCGCCAAATCACAAAGCAT
GTTGCACAGATACTAGATTCCCGAATGAATACGAAATACGACGAGAACGATAAGCTGATTCG
GGAAGTCAAAGTAATCACTTTAAAGTCAAAATTGGTGTCGGACTTCAGAAAGGATTTTCAAT
TCTATAAAGTTAGGGAGATAAATAACTACCACCATGCGCACGACGCTTATCTTAATGCCGTC
GTAGGGACCGCACTCATTAAGAAATACCCGAAGCTAGAAAGTGAGTTTGTGTATGGTGATTA
CAAAGTTTATGACGTCCGTAAGATGATCGCGAAAAGCGAACAGGAGATAGGCAAGGCTACAG
CCAAATACTTCTTTTATTCTAACATTATGAATTTCTTTAAGACGGAAATCACTCTGGCAAAC
GGAGAGATACGCAAACGACCTTTAATTGAAACCAATGGGGAGACAGGTGAAATCGTATGGGA
TAAGGGCCGGGACTTCGCGACGGTGAGAAAAGTTTTGTCCATGCCCCAAGTCAACATAGTAA
AGAAAACTGAGGTGCAGACCGGAGGGTTTTCAAAGGAATCGATTCTTCCAAAAAGGAATAGT
GATAAGCTCATCGCTCGTAAAAAGGACTGGGACCCGAAAAAGTACGGTGGCTTCGATAGCCC
TACAGTTGCCTATTCTGTCCTAGTAGTGGCAAAAGTTGAGAAGGGAAAATCCAAGAAACTGA
AGTCAGTCAAAGAATTATTGGGGATAACGATTATGGAGCGCTCGTCTTTTGAAAAGAACCCC
ATCGACTTCCTTGAGGCGAAAGGTTACAAGGAAGTAAAAAAGGATCTCATAATTAAACTACC
AAAGTATAGTCTGTTTGAGTTAGAAAATGGCCGAAAACGGATGTTGGCTAGCGCCGGAGAGC
TTCAAAAGGGGAACGAACTCGCACTACCGTCTAAATACGTGAATTTCCTGTATTTAGCGTCC
CATTACGAGAAGTTGAAAGGTTCACCTGAAGATAACGAACAGAAGCAACTTTTTGTTGAGCA
GCACAAACATTATCTCGACGAAATCATAGAGCAAATTTCGGAATTCAGTAAGAGAGTCATCC
TAGCTGATGCCAATCTGGACAAAGTATTAAGCGCATACAACAAGCACAGGGATAAACCCATA
CGTGAGCAGGCGGAAAATATTATCCATTTGTTTACTCTTACCAACCTCGGCGCTCCAGCCGC
ATTCAAGTATTTTGACACAACGATAGATCGCAAACGATACACTTCTACCAAGGAGGTGCTAG
ACGCGACACTGATTCACCAATCCATCACGGGATTATATGAAACTCGGATAGATTTGTCACAG
CTTGGGGGTGACGGATCCCCCAAGAAGAAGAGGAAAGTCTCGAGCGACTACAAAGACCATGA
CGGTGATTATAAAGATCATGACATCGATTACAAGGATGACGATGACAAGGCTGCAGGA
MDKKYSIGLAIGTNSVGWAVITDEYKVPSKKFKVLGNTDRHSIKKNLIGALLFDSGETAEAT
RLKRTARRRYTRRKNRICYLQEIFSNEMAKVDDSFFHRLEESFLVEEDKKHERHPIFGNIVD
EVAYHEKYPTIYHLRKKLVDSTDKADLRLIYLALAHMIKFRGHFLIEGDLNPDNSDVDKLFI
QLVQTYNQLFEENPINASGVDAKAILSARLSKSRRLENLIAQLPGEKKNGLFGNLIALSLGL
TPNFKSNFDLAEDAKLQLSKDTYDDDLDNLLAQIGDQYADLFLAAKNLSDAILLSDILRVNT
EITKAPLSASMIKRYDEHHQDLTLLKALVRQQLPEKYKEIFFDQSKNGYAGYIDGGASQEEF
YKFIKPILEKMDGTEELLVKLNREDLLRKQRTFDNGSIPHQIHLGELHAILRRQEDFYPFLK
DNREKIEKILTFRIPYYVGPLARGNSRFAWMTRKSEETITPWNFEEVVDKGASAQSFIERMT
NFDKNLPNEKVLPKHSLLYEYFTVYNELTKVKYVTEGMRKPAFLSGEQKKAIVDLLFKTNRK
VTVKQLKEDYFKKIECFDSVEISGVEDRFNASLGTYHDLLKIIKDKDFLDNEENEDILEDIV
LTLTLFEDREMIEERLKTYAHLFDDKVMKQLKRRRYTGWGRLSRKLINGIRDKQSGKTILDF
LKSDGFANRNFMQLIHDDSLTFKEDIQKAQVSGQGDSLHEHIANLAGSPAIKKGILQTVKVV
DELVKVMGRHKPENIVIEMARENQTTQKGQKNSRERMKRIEEGIKELGSQILKEHPVENTQL
QNEKLYLYYLQNGRDMYVDQELDINRLSDYDVDHIVPQSFLKDDSIDNKVLTRSDKNRGKSD
NVPSEEVVKKMKNYWRQLLNAKLITQRKFDNLTKAERGGLSELDKAGFIKRQLVETRQITKH
VAQILDSRMNTKYDENDKLIREVKVITLKSKLVSDFRKDFQFYKVREINNYHHAHDAYLNAV
VGTALIKKYPKLESEFVYGDYKVYDVRKMIAKSEQEIGKATAKYFFYSNIMNFFKTEITLAN
GEIRKRPLIETNGETGEIVWDKGRDFATVRKVLSMPQVNIVKKTEVQTGGFSKESILPKRNS
DKLIARKKDWDPKKYGGFDSPTVAYSVLVVAKVEKGKSKKLKSVKELLGITIMERSSFEKNP
IDFLEAKGYKEVKKDLIIKLPKYSLFELENGRKRMLASAGELQKGNELALPSKYVNFLYLAS
HYEKLKGSPEDNEQKQLFVEQHKHYLDEIIEQISEFSKRVILADANLDKVLSAYNKHRDKPI
REQAENIIHLFTLTNLGAPAAFKYFDTTIDRKRYTSTKEVLDATLIHQSITGLYETRIDLSQ
LGGD
(single underline: HNH domain; double underline: RuvC domain).

[0245] In some embodiments, wild type Cas9 corresponds to Cas9 from Streptococcus pyogenes (NCBI Reference Sequence: NC_002737.2 (nucleotide sequence as follows); and Uniprot Reference Sequence: Q99ZW2 (amino acid sequence as follows):

ATGGATAAGAAATACTCAATAGGCTTAGATATCGGCACAAATAGCGTCGGATGGGCGGTGAT
CACTGATGAATATAAGGTTCCGTCTAAAAAGTTCAAGGTTCTGGGAAATACAGACCGCCACA
GTATCAAAAAAAATCTTATAGGGGCTCTTTTATTTGACAGTGGAGAGACAGCGGAAGCGACT
CGTCTCAAACGGACAGCTCGTAGAAGGTATACACGTCGGAAGAATCGTATTTGTTATCTACA
GGAGATTTTTTCAAATGAGATGGCGAAAGTAGATGATAGTTTCTTTCATCGACTTGAAGAGT
CTTTTTTGGTGGAAGAAGACAAGAAGCATGAACGTCATCCTATTTTTGGAAATATAGTAGAT
GAAGTTGCTTATCATGAGAAATATCCAACTATCTATCATCTGCGAAAAAAATTGGTAGATTC
TACTGATAAAGCGGATTTGCGCTTAATCTATTTGGCCTTAGCGCATATGATTAAGTTTCGTG
GTCATTTTTTGATTGAGGGAGATTTAAATCCTGATAATAGTGATGTGGACAAACTATTTATC
CAGTTGGTACAAACCTACAATCAATTATTTGAAGAAAACCCTATTAACGCAAGTGGAGTAGA
TGCTAAAGCGATTCTTTCTGCACGATTGAGTAAATCAAGACGATTAGAAAATCTCATTGCTC
AGCTCCCCGGTGAGAAGAAAAATGGCTTATTTGGGAATCTCATTGCTTTGTCATTGGGTTTG
ACCCCTAATTTTAAATCAAATTTTGATTTGGCAGAAGATGCTAAATTACAGCTTTCAAAAGA
TACTTACGATGATGATTTAGATAATTTATTGGCGCAAATTGGAGATCAATATGCTGATTTGT
TTTTGGCAGCTAAGAATTTATCAGATGCTATTTTACTTTCAGATATCCTAAGAGTAAATACT
GAAATAACTAAGGCTCCCCTATCAGCTTCAATGATTAAACGCTACGATGAACATCATCAAGA
CTTGACTCTTTTAAAAGCTTTAGTTCGACAACAACTTCCAGAAAAGTATAAAGAAATCTTTT
TTGATCAATCAAAAAACGGATATGCAGGTTATATTGATGGGGGAGCTAGCCAAGAAGAATTT
TATAAATTTATCAAACCAATTTTAGAAAAAATGGATGGTACTGAGGAATTATTGGTGAAACT
AAATCGTGAAGATTTGCTGCGCAAGCAACGGACCTTTGACAACGGCTCTATTCCCCATCAAA
TTCACTTGGGTGAGCTGCATGCTATTTTGAGAAGACAAGAAGACTTTTATCCATTTTTAAAA
GACAATCGTGAGAAGATTGAAAAAATCTTGACTTTTCGAATTCCTTATTATGTTGGTCCATT
GGCGCGTGGCAATAGTCGTTTTGCATGGATGACTCGGAAGTCTGAAGAAACAATTACCCCAT
GGAATTTTGAAGAAGTTGTCGATAAAGGTGCTTCAGCTCAATCATTTATTGAACGCATGACA
AACTTTGATAAAAATCTTCCAAATGAAAAAGTACTACCAAAACATAGTTTGCTTTATGAGTA
TTTTACGGTTTATAACGAATTGACAAAGGTCAAATATGTTACTGAAGGAATGCGAAAACCAG
CATTTCTTTCAGGTGAACAGAAGAAAGCCATTGTTGATTTACTCTTCAAAACAAATCGAAAA
GTAACCGTTAAGCAATTAAAAGAAGATTATTTCAAAAAAATAGAATGTTTTGATAGTGTTGA
AATTTCAGGAGTTGAAGATAGATTTAATGCTTCATTAGGTACCTACCATGATTTGCTAAAAA
TTATTAAAGATAAAGATTTTTTGGATAATGAAGAAAATGAAGATATCTTAGAGGATATTGTT
TTAACATTGACCTTATTTGAAGATAGGGAGATGATTGAGGAAAGACTTAAAACATATGCTCA
CCTCTTTGATGATAAGGTGATGAAACAGCTTAAACGTCGCCGTTATACTGGTTGGGGACGTT
TGTCTCGAAAATTGATTAATGGTATTAGGGATAAGCAATCTGGCAAAACAATATTAGATTTT
TTGAAATCAGATGGTTTTGCCAATCGCAATTTTATGCAGCTGATCCATGATGATAGTTTGAC
ATTTAAAGAAGACATTCAAAAAGCACAAGTGTCTGGACAAGGCGATAGTTTACATGAACATA
TTGCAAATTTAGCTGGTAGCCCTGCTATTAAAAAAGGTATTTTACAGACTGTAAAAGTTGTT
GATGAATTGGTCAAAGTAATGGGGCGGCATAAGCCAGAAAATATCGTTATTGAAATGGCACG
TGAAAATCAGACAACTCAAAAGGGCCAGAAAAATTCGCGAGAGCGTATGAAACGAATCGAAG
AAGGTATCAAAGAATTAGGAAGTCAGATTCTTAAAGAGCATCCTGTTGAAAATACTCAATTG
CAAAATGAAAAGCTCTATCTCTATTATCTCCAAAATGGAAGAGACATGTATGTGGACCAAGA
ATTAGATATTAATCGTTTAAGTGATTATGATGTCGATCACATTGTTCCACAAAGTTTCCTTA
AAGACGATTCAATAGACAATAAGGTCTTAACGCGTTCTGATAAAAATCGTGGTAAATCGGAT
AACGTTCCAAGTGAAGAAGTAGTCAAAAAGATGAAAAACTATTGGAGACAACTTCTAAACGC
CAAGTTAATCACTCAACGTAAGTTTGATAATTTAACGAAAGCTGAACGTGGAGGTTTGAGTG
AACTTGATAAAGCTGGTTTTATCAAACGCCAATTGGTTGAAACTCGCCAAATCACTAAGCAT
GTGGCACAAATTTTGGATAGTCGCATGAATACTAAATACGATGAAAATGATAAACTTATTCG
AGAGGTTAAAGTGATTACCTTAAAATCTAAATTAGTTTCTGACTTCCGAAAAGATTTCCAAT
TCTATAAAGTACGTGAGATTAACAATTACCATCATGCCCATGATGCGTATCTAAATGCCGTC
GTTGGAACTGCTTTGATTAAGAAATATCCAAAACTTGAATCGGAGTTTGTCTATGGTGATTA
TAAAGTTTATGATGTTCGTAAAATGATTGCTAAGTCTGAGCAAGAAATAGGCAAAGCAACCG
CAAAATATTTCTTTTACTCTAATATCATGAACTTCTTCAAAACAGAAATTACACTTGCAAAT
GGAGAGATTCGCAAACGCCCTCTAATCGAAACTAATGGGGAAACTGGAGAAATTGTCTGGGA
TAAAGGGCGAGATTTTGCCACAGTGCGCAAAGTATTGTCCATGCCCCAAGTCAATATTGTCA
AGAAAACAGAAGTACAGACAGGCGGATTCTCCAAGGAGTCAATTTTACCAAAAAGAAATTCG
GACAAGCTTATTGCTCGTAAAAAAGACTGGGATCCAAAAAAATATGGTGGTTTTGATAGTCC
AACGGTAGCTTATTCAGTCCTAGTGGTTGCTAAGGTGGAAAAAGGGAAATCGAAGAAGTTAA
AATCCGTTAAAGAGTTACTAGGGATCACAATTATGGAAAGAAGTTCCTTTGAAAAAAATCCG
ATTGACTTTTTAGAAGCTAAAGGATATAAGGAAGTTAAAAAAGACTTAATCATTAAACTACC
TAAATATAGTCTTTTTGAGTTAGAAAACGGTCGTAAACGGATGCTGGCTAGTGCCGGAGAAT
TACAAAAAGGAAATGAGCTGGCTCTGCCAAGCAAATATGTGAATTTTTTATATTTAGCTAGT
CATTATGAAAAGTTGAAGGGTAGTCCAGAAGATAACGAACAAAAACAATTGTTTGTGGAGCA
GCATAAGCATTATTTAGATGAGATTATTGAGCAAATCAGTGAATTTTCTAAGCGTGTTATTT
TAGCAGATGCCAATTTAGATAAAGTTCTTAGTGCATATAACAAACATAGAGACAAACCAATA
CGTGAACAAGCAGAAAATATTATTCATTTATTTACGTTGACGAATCTTGGAGCTCCCGCTGC
TTTTAAATATTTTGATACAACAATTGATCGTAAACGATATACGTCTACAAAAGAAGTTTTAG
ATGCCACTCTTATCCATCAATCCATCACTGGTCTTTATGAAACACGCATTGATTTGAGTCAG
CTAGGAGGTGACTGA
MDKKYSIGLDIGTNSVGWAVITDEYKVPSKKFKVLGNTDRHSIKKNLIGALLFDSGETAEAT
RLKRTARRRYTRRKNRICYLQEIFSNEMAKVDDSFFHRLEESFLVEEDKKHERHPIFGNIVD
EVAYHEKYPTIYHLRKKLVDSTDKADLRLIYLALAHMIKFRGHFLIEGDLNPDNSDVDKLFI
QLVQTYNQLFEENPINASGVDAKAILSARLSKSRRLENLIAQLPGEKKNGLFGNLIALSLGL
TPNFKSNFDLAEDAKLQLSKDTYDDDLDNLLAQIGDQYADLFLAAKNLSDAILLSDILRVNT
EITKAPLSASMIKRYDEHHQDLTLLKALVRQQLPEKYKEIFFDQSKNGYAGYIDGGASQEEF
YKFIKPILEKMDGTEELLVKLNREDLLRKQRTFDNGSIPHQIHLGELHAILRRQEDFYPFLK
DNREKIEKILTFRIPYYVGPLARGNSRFAWMTRKSEETITPWNFEEVVDKGASAQSFIERMT
NFDKNLPNEKVLPKHSLLYEYFTVYNELTKVKYVTEGMRKPAFLSGEQKKAIVDLLFKTNRK
VTVKQLKEDYFKKIECFDSVEISGVEDRFNASLGTYHDLLKIIKDKDFLDNEENEDILEDIV
LTLTLFEDREMIEERLKTYAHLFDDKVMKQLKRRRYTGWGRLSRKLINGIRDKQSGKTILDF
LKSDGFANRNFMQLIHDDSLTFKEDIQKAQVSGQGDSLHEHIANLAGSPAIKKGILQTVKVV
DELVKVMGRHKPENIVIEMARENQTTQKGQKNSRERMKRIEEGIKELGSQILKEHPVENTQL
QNEKLYLYYLQNGRDMYVDQELDINRLSDYDVDHIVPQSFLKDDSIDNKVLTRSDKNRGKSD
NVPSEEVVKKMKNYWRQLLNAKLITQRKFDNLTKAERGGLSELDKAGFIKRQLVETRQITKH
VAQILDSRMNTKYDENDKLIREVKVITLKSKLVSDFRKDFQFYKVREINNYHHAHDAYLNAV
VGTALIKKYPKLESEFVYGDYKVYDVRKMIAKSEQEIGKATAKYFFYSNIMNFFKTEITLAN
GEIRKRPLIETNGETGEIVWDKGRDFATVRKVLSMPQVNIVKKTEVQTGGFSKESILPKRNS
DKLIARKKDWDPKKYGGFDSPTVAYSVLVVAKVEKGKSKKLKSVKELLGITIMERSSFEKNP
IDFLEAKGYKEVKKDLIIKLPKYSLFELENGRKRMLASAGELQKGNELALPSKYVNFLYLAS
HYEKLKGSPEDNEQKQLFVEQHKHYLDEIIEQISEFSKRVILADANLDKVLSAYNKHRDKPI
REQAENIIHLFTLTNLGAPAAFKYFDTTIDRKRYTSTKEVLDATLIHQSITGLYETRIDLSQ
LGGD
(single underline: HNH domain; double underline: RuvC domain)

[0246] In some embodiments, Cas9 refers to Cas9 from: Corynebacterium ulcerans (NCBI Refs: NC_015683.1, NC_017317.1); Corynebacterium diphtheria (NCBI Refs: NC_016782.1, NC_016786.1); Spiroplasma syrphidicola (NCBI Ref: NC_021284.1); Prevotella intermedia (NCBI Ref: NC_017861.1); Spiroplasma taiwanense (NCBI Ref: NC_021846.1); Streptococcus iniae (NCBI Ref: NC_021314.1); Belliella baltica (NCBI Ref: NC_018010.1); Psychroflexus torquis I (NCBI Ref: NC_018721.1); Streptococcus thermophilus (NCBI Ref: YP_820832.1), Listeria innocua (NCBI Ref: NP_472073.1), Campylobacter jejuni (NCBI Ref: YP_002344900.1) or Neisseria meningitidis (NCBI Ref: YP_002342100.1) or to a Cas9 from any other organism.

[0247] It should be appreciated that additional Cas9 proteins (e.g., a nuclease dead Cas9 (dCas9), a Cas9 nickase (nCas9), or a nuclease active Cas9), including variants and homologs thereof, are within the scope of this disclosure. Exemplary Cas9 proteins include, without limitation, those provided below. In some embodiments, the Cas9 protein is a nuclease dead Cas9 (dCas9). In some embodiments, the Cas9 protein is a Cas9 nickase (nCas9). In some embodiments, the Cas9 protein is a nuclease active Cas9.

[0248] In some embodiments, the Cas9 domain is a nuclease-inactive Cas9 domain (dCas9). For example, the dCas9 domain may bind to a duplexed nucleic acid molecule (e.g., via a gRNA molecule) without cleaving either strand of the duplexed nucleic acid molecule. In some embodiments, the nuclease-inactive dCas9 domain comprises a DIOX mutation and a H840X mutation of the amino acid sequence set forth herein, or a corresponding mutation in any of the amino acid sequences provided herein, wherein X is any amino acid change. In some embodiments, the nuclease-inactive dCas9 domain comprises a D10A mutation and a H840A mutation of the amino acid sequence set forth herein, or a corresponding mutation in any of the amino acid sequences provided herein. As one example, a nuclease-inactive Cas9 domain comprises the amino acid sequence set forth in Cloning vector pPlatTET-gRNA2 (Accession No. BAV54124).

[0249] The amino acid sequence of an exemplary catalytically inactive Cas9 (dCas9) is as follows:

MDKKYSIGLAIGTNSVGWAVITDEYKVPSKKFKVLGNTDRHSIKKNLIGA
LLFDSGETAEATRLKRTARRRYTRRKNRICYLQEIFSNEMAKVDDSFFHR
LEESFLVEEDKKHERHPIFGNIVDEVAYHEKYPTIYHLRKKLVDSTDKAD
LRLIYLALAHMIKFRGHFLIEGDLNPDNSDVDKLFIQLVQTYNQLFEENP
INASGVDAKAILSARLSKSRRLENLIAQLPGEKKNGLFGNLIALSLGLTP
NFKSNFDLAEDAKLQLSKDTYDDDLDNLLAQIGDQYADLFLAAKNLSDAI
LLSDILRVNTEITKAPLSASMIKRYDEHHQDLTLLKALVRQQLPEKYKEI
FFDQSKNGYAGYIDGGASQEEFYKFIKPILEKMDGTEELLVKLNREDLLR
KQRTFDNGSIPHQIHLGELHAILRRQEDFYPFLKDNREKIEKILTFRIPY
YVGPLARGNSRFAWMTRKSEETITPWNFEEVVDKGASAQSFIERMTNFDK
NLPNEKVLPKHSLLYEYFTVYNELTKVKYVTEGMRKPAFLSGEQKKAIVD
LLFKTNRKVTVKQLKEDYFKKIECFDSVEISGVEDRFNASLGTYHDLLKI
IKDKDFLDNEENEDILEDIVLTLTLFEDREMIEERLKTYAHLFDDKVMKQ
LKRRRYTGWGRLSRKLINGIRDKQSGKTILDFLKSDGFANRNFMQLIHDD
SLTFKEDIQKAQVSGQGDSLHEHIANLAGSPAIKKGILQTVKVVDELVKV
MGRHKPENIVIEMARENQTTQKGQKNSRERMKRIEEGIKELGSQILKEHP
VENTQLQNEKLYLYYLQNGRDMYVDQELDINRLSDYDVDAIVPQSFLKDD
SIDNKVLTRSDKNRGKSDNVPSEEVVKKMKNYWRQLLNAKLITQRKFDNL
TKAERGGLSELDKAGFIKRQLVETRQITKHVAQILDSRMNTKYDENDKLI
REVKVITLKSKLVSDFRKDFQFYKVREINNYHHAHDAYLNAVVGTALIKK
YPKLESEFVYGDYKVYDVRKMIAKSEQEIGKATAKYFFYSNIMNFFKTEI
TLANGEIRKRPLIETNGETGEIVWDKGRDFATVRKVLSMPQVNIVKKTEV
QTGGFSKESILPKRNSDKLIARKKDWDPKKYGGFDSPTVAYSVLVVAKVE
KGKSKKLKSVKELLGITIMERSSFEKNPIDFLEAKGYKEVKKDLIIKLPK
YSLFELENGRKRMLASAGELQKGNELALPSKYVNFLYLASHYEKLKGSPE
DNEQKQLFVEQHKHYLDEIIEQISEFSKRVILADANLDKVLSAYNKHRDK
PIREQAENIIHLFTLTNLGAPAAFKYFDTTIDRKRYTSTKEVLDATLIHQ
SITGLYETRIDLSQLGGD

(see, e.g., Qi et al., “Repurposing CRISPR as an RNA-guided platform for sequence-specific control of gene expression.” Cell. 2013; 152(5):1173-83, the entire contents of which are incorporated herein by reference).

[0250] In some embodiments, a Cas9 nuclease has an inactive (e.g., an inactivated) DNA cleavage domain, that is, the Cas9 is a nickase, referred to as an “nCas9” protein (for “nickase” Cas9). A nuclease-inactivated Cas9 protein may interchangeably be referred to as a “dCas9” protein (for nuclease-“dead” Cas9) or catalytically inactive Cas9. Methods for generating a Cas9 protein (or a fragment thereof) having an inactive DNA cleavage domain are known (See, e.g., Jinek et al., Science. 337:816-821(2012); Qi et al., “Repurposing CRISPR as an RNA-Guided Platform for Sequence-Specific Control of Gene Expression” (2013) Cell. 28; 152(5):1173-83, the entire contents of each of which are incorporated herein by reference). For example, the DNA cleavage domain of Cas9 is known to include two subdomains, the HNH nuclease subdomain and the RuvC1 subdomain. The HNH subdomain cleaves the strand complementary to the gRNA, whereas the RuvC1 subdomain cleaves the non-complementary strand. Mutations within these subdomains can silence the nuclease activity of Cas9. For example, the mutations D10A and H840A completely inactivate the nuclease activity of S. pyogenes Cas9 (Jinek et al., Science. 337:816-821(2012); Qi et al., Cell. 28; 152(5):1173-83 (2013)).

[0251] In some embodiments, the dCas9 domain comprises an amino acid sequence that is at least 60%, at least 65%, at least 70%, at least 75%, at least 80%, at least 85%, at least 90%, at least 95%, at least 96%, at least 97%, at least 98%, at least 99%, or at least 99.5% identical to any one of the dCas9 domains provided herein. In some embodiments, the Cas9 domain comprises an amino acid sequences that has 1, 2, 3, 4, 5, 6, 7, 8, 9, 10, 11, 12, 13, 14, 15, 16, 17, 18, 19, 20, 21, 22, 21, 24, 25, 26, 27, 28, 29, 30, 31, 32, 33, 34, 35, 36, 37, 38, 39, 40, 41, 42, 43, 44, 45, 46, 47, 48, 49, 50 or more or more mutations compared to any one of the amino acid sequences set forth herein. In some embodiments, the Cas9 domain comprises an amino acid sequence that has at least 10, at least 15, at least 20, at least 30, at least 40, at least 50, at least 60, at least 70, at least 80, at least 90, at least 100, at least 150, at least 200, at least 250, at least 300, at least 350, at least 400, at least 500, at least 600, at least 700, at least 800, at least 900, at least 1000, at least 1100, or at least 1200 identical contiguous amino acid residues as compared to any one of the amino acid sequences set forth herein.

[0252] In some embodiments, dCas9 corresponds to, or comprises in part or in whole, a Cas9 amino acid sequence having one or more mutations that inactivate the Cas9 nuclease activity. For example, in some embodiments, a dCas9 domain comprises D10A and an H840A mutation or corresponding mutations in another Cas9.

[0253] In some embodiments, the dCas9 comprises the amino acid sequence of dCas9 (D10A and H840A):

MDKKYSIGLAIGTNSVGWAVITDEYKVPSKKFKVLGNTDRHSIKKNLIGA
LLFDSGETAEATRLKRTARRRYTRRKNRICYLQEIFSNEMAKVDDSFFHR
LEESFLVEEDKKHERHPIFGNIVDEVAYHEKYPTIYHLRKKLVDSTDKAD
LRLIYLALAHMIKFRGHFLIEGDLNPDNSDVDKLFIQLVQTYNQLFEENP
INASGVDAKAILSARLSKSRRLENLIAQLPGEKKNGLFGNLIALSLGLTP
NFKSNFDLAEDAKLQLSKDTYDDDLDNLLAQIGDQYADLFLAAKNLSDAI
LLSDILRVNTEITKAPLSASMIKRYDEHHQDLTLLKALVRQQLPEKYKEI
FFDQSKNGYAGYIDGGASQEEFYKFIKPILEKMDGTEELLVKLNREDLLR
KQRTFDNGSIPHQIHLGELHAILRRQEDFYPFLKDNREKIEKILTFRIPY
YVGPLARGNSRFAWMTRKSEETITPWNFEEVVDKGASAQSFIERMTNFDK
NLPNEKVLPKHSLLYEYFTVYNELTKVKYVTEGMRKPAFLSGEQKKAIVD
LLFKTNRKVTVKQLKEDYFKKIECFDSVEISGVEDRFNASLGTYHDLLKI
IKDKDFLDNEENEDILEDIVLTLTLFEDREMIEERLKTYAHLFDDKVMKQ
LKRRRYTGWGRLSRKLINGIRDKQSGKTILDFLKSDGFANRNFMQLIHDD
SLTFKEDIQKAQVSGQGDSLHEHIANLAGSPAIKKGILQTVKVVDELVKV
MGRHKPENIVIEMARENQTTQKGQKNSRERMKRIEEGIKELGSQILKEHP
VENTQLQNEKLYLYYLQNGRDMYVDQELDINRLSDYDVDAIVPQSFLKDD
SIDNKVLTRSDKNRGKSDNVPSEEVVKKMKNYWRQLLNAKLITQRKFDNL
TKAERGGLSELDKAGFIKRQLVETRQITKHVAQILDSRMNTKYDENDKLI
REVKVITLKSKLVSDFRKDFQFYKVREINNYHHAHDAYLNAVVGTALIKK
YPKLESEFVYGDYKVYDVRKMIAKSEQEIGKATAKYFFYSNIMNFFKTEI
TLANGEIRKRPLIETNGETGEIVWDKGRDFATVRKVLSMPQVNIVKKTEV
QTGGFSKESILPKRNSDKLIARKKDWDPKKYGGFDSPTVAYSVLVVAKVE
KGKSKKLKSVKELLGITIMERSSFEKNPIDFLEAKGYKEVKKDLIIKLPK
YSLFELENGRKRMLASAGELQKGNELALPSKYVNFLYLASHYEKLKGSPE
DNEQKQLFVEQHKHYLDEIIEQISEFSKRVILADANLDKVLSAYNKHRDK
PIREQAENIIHLFTLTNLGAPAAFKYFDTTIDRKRYTSTKEVLDATLIHQ
SITGLYETRIDLSQLGGD
(single underline: HNH domain; double underline:
RuvC domain).

[0254] In some embodiments, the Cas9 domain comprises a D10A mutation, while the residue at position 840 remains a histidine in the amino acid sequence provided above, or at corresponding positions in any of the amino acid sequences provided herein.

[0255] In other embodiments, dCas9 variants having mutations other than D10A and H840A are provided, which, e.g., result in nuclease inactivated Cas9 (dCas9). Such mutations, by way of example, include other amino acid substitutions at D10 and H840, or other substitutions within the nuclease domains of Cas9 (e.g., substitutions in the HNH nuclease subdomain and/or the RuvC1 subdomain). In some embodiments, variants or homologues of dCas9 are provided which are at least about 70% identical, at least about 80% identical, at least about 90% identical, at least about 95% identical, at least about 98% identical, at least about 99% identical, at least about 99.5% identical, or at least about 99.9% identical. In some embodiments, variants of dCas9 are provided having amino acid sequences which are shorter, or longer, by about 5 amino acids, by about 10 amino acids, by about 15 amino acids, by about 20 amino acids, by about 25 amino acids, by about 30 amino acids, by about 40 amino acids, by about 50 amino acids, by about 75 amino acids, by about 100 amino acids or more.

[0256] In some embodiments, the Cas9 domain is a Cas9 nickase. The Cas9 nickase may be a Cas9 protein that is capable of cleaving only one strand of a duplexed nucleic acid molecule (e.g., a duplexed DNA molecule). In some embodiments, the Cas9 nickase cleaves the target strand of a duplexed nucleic acid molecule, meaning that the Cas9 nickase cleaves the strand that is base paired to (complementary to) a gRNA (e.g., an sgRNA) that is bound to the Cas9. In some embodiments, a Cas9 nickase comprises a D10A mutation and has a histidine at position 840. In some embodiments, the Cas9 nickase cleaves the non-target, non-base-edited strand of a duplexed nucleic acid molecule, meaning that the Cas9 nickase cleaves the strand that is not base paired to a gRNA (e.g., an sgRNA) that is bound to the Cas9. In some embodiments, a Cas9 nickase comprises an H840A mutation and has an aspartic acid residue at position 10, or a corresponding mutation. In some embodiments, the Cas9 nickase comprises an amino acid sequence that is at least 60%, at least 65%, at least 70%, at least 75%, at least 80%, at least 85%, at least 90%, at least 95%, at least 96%, at least 97%, at least 98%, at least 99%, or at least 99.5% identical to any one of the Cas9 nickases provided herein. Additional suitable Cas9 nickases will be apparent to those of skill in the art based on this disclosure and knowledge in the field, and are within the scope of this disclosure.

[0257] The amino acid sequence of an exemplary catalytically Cas9 nickase (nCas9) is as follows:

MDKKYSIGLAIGTNSVGWAVITDEYKVPSKKFKVLGNTDRHSIKKNLIGA
LLFDSGETAEATRLKRTARRRYTRRKNRICYLQEIFSNEMAKVDDSFFHR
LEESFLVEEDKKHERHPIFGNIVDEVAYHEKYPTIYHLRKKLVDSTDKAD
LRLIYLALAHMIKFRGHFLIEGDLNPDNSDVDKLFIQLVQTYNQLFEENP
INASGVDAKAILSARLSKSRRLENLIAQLPGEKKNGLFGNLIALSLGLTP
NFKSNFDLAEDAKLQLSKDTYDDDLDNLLAQIGDQYADLFLAAKNLSDAI
LLSDILRVNTEITKAPLSASMIKRYDEHHQDLTLLKALVRQQLPEKYKEI
FFDQSKNGYAGYIDGGASQEEFYKFIKPILEKMDGTEELLVKLNREDLLR
KQRTFDNGSIPHQIHLGELHAILRRQEDFYPFLKDNREKIEKILTFRIPY
YVGPLARGNSRFAWMTRKSEETITPWNFEEVVDKGASAQSFIERMTNFDK
NLPNEKVLPKHSLLYEYFTVYNELTKVKYVTEGMRKPAFLSGEQKKAIVD
LLFKTNRKVTVKQLKEDYFKKIECFDSVEISGVEDRFNASLGTYHDLLKI
IKDKDFLDNEENEDILEDIVLTLTLFEDREMIEERLKTYAHLFDDKVMKQ
LKRRRYTGWGRLSRKLINGIRDKQSGKTILDFLKSDGFANRNFMQLIHDD
SLTFKEDIQKAQVSGQGDSLHEHIANLAGSPAIKKGILQTVKVVDELVKV
MGRHKPENIVIEMARENQTTQKGQKNSRERMKRIEEGIKELGSQILKEHP
VENTQLQNEKLYLYYLQNGRDMYVDQELDINRLSDYDVDHIVPQSFLKDD
SIDNKVLTRSDKNRGKSDNVPSEEVVKKMKNYWRQLLNAKLITQRKFDNL
TKAERGGLSELDKAGFIKRQLVETRQITKHVAQILDSRMNTKYDENDKLI
REVKVITLKSKLVSDFRKDFQFYKVREINNYHHAHDAYLNAVVGTALIKK
YPKLESEFVYGDYKVYDVRKMIAKSEQEIGKATAKYFFYSNIMNFFKTEI
TLANGEIRKRPLIETNGETGEIVWDKGRDFATVRKVLSMPQVNIVKKTEV
QTGGFSKESILPKRNSDKLIARKKDWDPKKYGGFDSPTVAYSVLVVAKVE
KGKSKKLKSVKELLGITIMERSSFEKNPIDFLEAKGYKEVKKDLIIKLPK
YSLFELENGRKRMLASAGELQKGNELALPSKYVNFLYLASHYEKLKGSPE
DNEQKQLFVEQHKHYLDEIIEQISEFSKRVILADANLDKVLSAYNKHRDK
PIREQAENIIHLFTLTNLGAPAAFKYFDTTIDRKRYTSTKEVLDATLIHQ
SITGLYETRIDLSQLGGD

[0258] In some embodiments, Cas9 refers to a Cas9 from archaea (e.g., nanoarchaea), which constitute a domain and kingdom of single-celled prokaryotic microbes. In some embodiments, the programmable nucleotide binding protein may be a CasX or CasY protein, which have been described in, for example, Burstein et al., “New CRISPR-Cas systems from uncultivated microbes.” Cell Res. 2017 Feb. 21. doi: 10.1038/cr.2017.21, the entire contents of which is hereby incorporated by reference. Using genome-resolved metagenomics, a number of CRISPR-Cas systems were identified, including the first reported Cas9 in the archaeal domain of life. This divergent Cas9 protein was found in little-studied nanoarchaea as part of an active CRISPR-Cas system. In bacteria, two previously unknown systems were discovered, CRISPR-CasX and CRISPR-CasY, which are among the most compact systems yet discovered. In some embodiments, in a base editor system described herein Cas9 is replaced by CasX, or a variant of CasX. In some embodiments, in a base editor system described herein Cas9 is replaced by CasY, or a variant of CasY. It should be appreciated that other RNA-guided DNA binding proteins may be used as a nucleic acid programmable DNA binding protein (napDNAbp), and are within the scope of this disclosure.

[0259] In some embodiments, the nucleic acid programmable DNA binding protein (napDNAbp) of any of the fusion proteins provided herein may be a CasX or CasY protein. In some embodiments, the napDNAbp is a CasX protein. In some embodiments, the napDNAbp is a CasY protein. In some embodiments, the napDNAbp comprises an amino acid sequence that is at least 85%, at least 90%, at least 91%, at least 92%, at least 93%, at least 94%, at least 95%, at least 96%, at least 97%, at least 98%, at least 99%, or at ease 99.5% identical to a naturally-occurring CasX or CasY protein. In some embodiments, the programmable nucleotide binding protein is a naturally-occurring CasX or CasY protein. In some embodiments, the programmable nucleotide binding protein comprises an amino acid sequence that is at least 85%, at least 90%, at least 91%, at least 92%, at least 93%, at least 94%, at least 95%, at least 96%, at least 97%, at least 98%, at least 99%, or at ease 99.5% identical to any CasX or CasY protein described herein. It should be appreciated that CasX and CasY from other bacterial species may also be used in accordance with the present disclosure.

[0260] An exemplary CasX ((uniprot.org/uniprot/F0NN87; uniprot.org/uniprot/F0NH53) tr|F0NN87|F0NN87_SULIHCRISPR-associatedCasx protein OS=Sulfolobus islandicus (strain HVE10/4) GN=SiH_0402 PE=4 SV=1) amino acid sequence is as follows:

MEVPLYNIFGDNYIIQVATEAENSTIYNNKVEIDDEELRNVLNLAYKIAK
NNEDAAAERRGKAKKKKGEEGETTTSNIILPLSGNDKNPWTETLKCYNFP
TTVALSEVFKNFSQVKECEEVSAPSFVKPEFYEFGRSPGMVERTRRVKLE
VEPHYLIIAAAGWVLTRLGKAKVSEGDYVGVNVFTPTRGILYSLIQNVNG
IVPGIKPETAFGLWIARKVVSSVTNPNVSVVRIYTISDAVGQNPTTINGG
FSIDLTKLLEKRYLLSERLEAIARNALSISSNMRERYIVLANYIYEYLTG
SKRLEDLLYFANRDLIMNLNSDDGKVRDLKLISAYVNGELIRGEG.

[0261] An exemplary CasX (>tr|F0NH53|F0NH53_SULIR CRISPR associated protein, Casx OS=Sulfolobus islandicus (strain REY15A) GN=SiRe_0771 PE=4 SV=1) amino acid sequence is as follows:

MEVPLYNIFGDNYIIQVATEAENSTIYNNKVEIDDEELRNVLNLAYKIAK
NNEDAAAERRGKAKKKKGEEGETTTSNIILPLSGNDKNPWTETLKCYNFP
TTVALSEVFKNFSQVKECEEVSAPSFVKPEFYKFGRSPGMVERTRRVKLE
VEPHYLIMAAAGWVLTRLGKAKVSEGDYVGVNVFTPTRGILYSLIQNVNG
IVPGIKPETAFGLWIARKVVSSVTNPNVSVVSIYTISDAVGQNPTTINGG
FSIDLTKLLEKRDLLSERLEAIARNALSISSNMRERYIVLANYIYEYLTG
SKRLEDLLYFANRDLIMNLNSDDGKVRDLKLISAYVNGELIRGEG.
Deltaproteobacteria CasX
MEKRINKIRKKLSADNATKPVSRSGPMKTLLVRVMTDDLKKRLEKRRKKP
EVMPQVISNNAANNLRMLLDDYTKMKEAILQVYWQEFKDDHVGLMCKFAQ
PASKKIDQNKLKPEMDEKGNLTTAGFACSQCGQPLFVYKLEQVSEKGKAY
TNYFGRCNVAEHEKLILLAQLKPVKDSDEAVTYSLGKFGQRALDFYSIHV
TKESTHPVKPLAQIAGNRYASGPVGKALSDACMGTIASFLSKYQDIIIEH
QKVVKGNQKRLESLRELAGKENLEYPSVTLPPQPHTKEGVDfAYNEVIAR
VRMWVNLNLWQKLKLSRDDAKPLLRLKGFPSFPVVERRENEVDWWNTINE
VKKLIDAKRDMGRVFWSGVTAEKRNTILEGYNYLPNENDHKKREGSLENP
KKPAKRQFGDLLLYLEKKYAGDWGKVFDEAWERIDKKIAGLTSHIEREEA
RNAEDAQSKAVLTDWLRAKASFVLERLKEMDEKEFYACEIQLQKWYGDLR
GNPFAVEAENRVVDISGFSIGSDGHSIQYRNLLAWKYLENGKREFYLLMN
YGKKGRIRFTDGTDIKKSGKWQGLLYGGGKAKVIDLTFDPDDEQLIILPL
AFGTRQGREFIWNDLLSLETGLIKLANGRVIEKTIYNKKIGRDEPALFVA
LTFERREVVDPSNIKPVNLIGVARGENIPAVIALTDPEGCPLPEFKDSSG
GPTDILRIGEGYKEKQRAIQAAKEVEQRRAGGYSRKFASKSRNLADDMVR
NSARDLFYHAVTHDAVLVFANLSRGFGRQGKRTFMTERQYTKMEDWLTAK
LAYEGLTSKTYLSKTLAQYTSKTCSNCGFTITYADMDVMLVRLKKTSDGW
ATTLNNKELKAEYQITYYNRYKRQTVEKELSAELDRLSEESGNNDISKWT
KGRRDEALFLLKKRFSHRPVQEQFVCLDCGHEVHAAEQAALNIARSWLFL
NSNSTEFKSYKSGKQPFVGAWQAFYKRRLKEVWKPNA

[0262] An exemplary CasY ((ncbi.nlm.nih.gov/protein/APG80656.1)>APG80656.1 CRISPR-associated protein CasY [uncultured Parcubacteria group bacterium]) amino acid sequence is as follows:

MSKRHPRISGVKGYRLHAQRLEYTGKSGAMRTIKYPLYSSPSGGRTVPR
EIVSAINDDYVGLYGLSNFDDLYNAEKRNEEKVYSVLDFWYDCVQYGAV
FSYTAPGLLKNVAEVRGGSYELTKTLKGSHLYDELQIDKVIKFLNKKEI
SRANGSLDKLKKDIIDCFKAEYRERHKDQCNKLADDIKNAKKDAGASLG
ERQKKLFRDFFGISEQSENDKPSFTNPLNLTCCLLPFDTVNNNRNRGEV
LFNKLKEYAQKLDKNEGSLEMWEYIGIGNSGTAFSNFLGEGFLGRLREN
KITELKKAMMDITDAWRGQEQEEELEKRLRILAALTIKLREPKFDNHWG
GYRSDINGKLSSWLQNYINQTVKIKEDLKGHKKDLKKAKEMINRFGESD
TKEEAVVSSLLESIEKIVPDDSADDEKPDIPAIAIYRRFLSDGRLTLNR
FVQREDVQEALIKERLEAEKKKKPKKRKKKSDAEDEKETIDFKELFPHL
AKPLKLVPNFYGDSKRELYKKYKNAAIYTDALWKAVEKIYKSAFSSSLK
NSFFDTDFDKDFFIKRLQKIFSVYRRFNTDKWKPIVKNSFAPYCDIVSL
AENEVLYKPKQSRSRKSAAIDKNRVRLPSTENIAKAGIALARELSVAGF
DWKDLLKKEEHEEYIDLIELHKTALALLLAVTETQLDISALDFVENGTV
KDFMKTRDGNLVLEGRFLEMFSQSIVFSELRGLAGLMSRKEFITRSAIQ
TMNGKQAELLYIPHEFQSAKITTPKEMSRAFLDLAPAEFATSLEPESLS
EKSLLKLKQMRYYPHYFGYELTRTGQGIDGGVAENALRLEKSPVKKREI
KCKQYKTLGRGQNKIVLYVRSSYYQTQFLEWFLHRPKNVQTDVAVSGSF
LIDEKKVKTRWNYDALTVALEPVSGSERVFVSQPFTIFPEKSAEEEGQR
YLGIDIGEYGIAYTALEITGDSAKILDQNFISDPQLKTLREEVKGLKLD
QRRGTFAMPSTKIARIRESLVHSLRNRIHHLALKHKAKIVYELEVSRFE
EGKQKIKKVYATLKKADVYSEIDADKNLQTTVWGKLAVASEISASYTSQ
FCGACKKLWRAEMQVDETITTQELIGTVRVIKGGTLIDAIKDFMRPPIF
DENDTPFPKYRDFCDKHHISKKMRGNSCLFICPFCRANADADIQASQTI
ALLRYVKEEKKVEDYFERFRKLKNIKVLGQMKKI.

[0263] In some embodiments, the nucleic acid programmable DNA binding protein (napDNAbp) is a single effector of a microbial CRISPR-Cas system. Single effectors of microbial CRISPR-Cas systems include, without limitation, Cas9, Cpf1, Cas12b/C2c1, and Cas12c/C2c3. Typically, microbial CRISPR-Cas systems are divided into Class 1 and Class 2 systems. Class 1 systems have multisubunit effector complexes, while Class 2 systems have a single protein effector. For example, Cas9 and Cpf1 are Class 2 effectors. In addition to Cas9 and Cpf1, three distinct Class 2 CRISPR-Cas systems (Cas12b/C2c1, and Cas12c/C2c3) have been described by Shmakov et al., “Discovery and Functional Characterization of Diverse Class 2 CRISPR Cas Systems”, Mol. Cell, 2015 Nov. 5; 60(3): 385-397, the entire contents of which is hereby incorporated by reference. Effectors of two of the systems, Cas12b/C2c1, and Cas12c/C2c3, contain RuvC-like endonuclease domains related to Cpf1. A third system contains an effector with two predicated HEPN RNase domains. Production of mature CRISPR RNA is tracrRNA-independent, unlike production of CRISPR RNA by Cas12b/C2c1. Cas12b/C2c1 depends on both CRISPR RNA and tracrRNA for DNA cleavage.

[0264] The crystal structure of Alicyclobaccillus acidoterrastris Cas12b/C2c1 (AacC2c1) has been reported in complex with a chimeric single-molecule guide RNA (sgRNA). See e.g., Liu et al., “C2c1-sgRNA Complex Structure Reveals RNA-Guided DNA Cleavage Mechanism”, Mol. Cell, 2017 Jan. 19; 65(2):310-322, the entire contents of which are hereby incorporated by reference. The crystal structure has also been reported in Alicyclobacillus acidoterrestris C2c1 bound to target DNAs as ternary complexes. See e.g., Yang et al., “PAM-dependent Target DNA Recognition and Cleavage by C2C1 CRISPR-Cas endonuclease”, Cell, 2016 Dec. 15; 167(7):1814-1828, the entire contents of which are hereby incorporated by reference. Catalytically competent conformations of AacC2c1, both with target and non-target DNA strands, have been captured independently positioned within a single RuvC catalytic pocket, with Cas12b/C2c1-mediated cleavage resulting in a staggered seven-nucleotide break of target DNA. Structural comparisons between Cas12b/C2c1 ternary complexes and previously identified Cas9 and Cpf1 counterparts demonstrate the diversity of mechanisms used by CRISPR-Cas9 systems.

[0265] In some embodiments, the nucleic acid programmable DNA binding protein (napDNAbp) of any of the fusion proteins provided herein may be a Cas12b/C2c1, or a Cas12c/C2c3 protein. In some embodiments, the napDNAbp is a Cas12b/C2c1 protein. In some embodiments, the napDNAbp is a Cas12c/C2c3 protein. In some embodiments, the napDNAbp comprises an amino acid sequence that is at least 85%, at least 90%, at least 91%, at least 92%, at least 93%, at least 94%, at least 95%, at least 96%, at least 97%, at least 98%, at least 99%, or at ease 99.5% identical to a naturally-occurring Cas12b/C2c1 or Cas12c/C2c3 protein. In some embodiments, the napDNAbp is a naturally-occurring Cas12b/C2c1 or Cas12c/C2c3 protein. In some embodiments, the napDNAbp comprises an amino acid sequence that is at least 85%, at least 90%, at least 91%, at least 92%, at least 93%, at least 94%, at least 95%, at least 96%, at least 97%, at least 98%, at least 99%, or at ease 99.5% identical to any one of the napDNAbp sequences provided herein. It should be appreciated that Cas12b/C2c1 or Cas12c/C2c3 from other bacterial species may also be used in accordance with the present disclosure.

[0266] A Cas12b/C2c1 ((uniprot.org/uniprot/T0D7A2#2) sp|T0D7A2|C2C1_ALIAG CRISPR-associated endonuclease C2c1 OS=Alicyclobacillus acido-terrestris (strain ATCC 49025/DSM 3922/CIP 106132/NCIMB 13137/GD3B) GN=c2c1 PE=1 SV=1) amino acid sequence is as follows:

MAVKSIKVKLRLDDMPEIRAGLWKLHKEVNAGVRYYTEWLSLLRQENLYR
RSPNGDGEQECDKTAEECKAELLERLRARQVENGHRGPAGSDDELLQLAR
QLYELLVPQAIGAKGDAQQIARKFLSPLADKDAVGGLGIAKAGNKPRWVR
MREAGEPGWEEEKEKAETRKSADRTADVLRALADFGLKPLMRVYTDSEMS
SVEWKPLRKGQAVRTWDRDMFQQAIERMMSWESWNQRVGQEYAKLVEQKN
RFEQKNFVGQEHLVHLVNQLQQDMKEASPGLESKEQTAHYVTGRALRGSD
KVFEKWGKLAPDAPFDLYDAEIKNVQRRNTRRFGSHDLFAKLAEPEYQAL
WREDASFLTRYAVYNSILRKLNHAKMFATFTLPDATAHPIWTRFDKLGGN
LHQYTFLFNEFGERRHAIRFHKLLKVENGVAREVDDVTVPISMSEQLDNL
LPRDPNEPIALYFRDYGAEQHFTGEFGGAKIQCRRDQLAHMHRRRGARDV
YLNVSVRVQSQSEARGERRPPYAAVFRLVGDNHRAFVHFDKLSDYLAEHP
DDGKLGSEGLLSGLRVMSVDLGLRTSASISVFRVARKDELKPNSKGRVPF
FFPIKGNDNLVAVHERSQLLKLPGETESKDLRAIREERQRTLRQLRTQLA
YLRLLVRCGSEDVGRRERSWAKLIEQPVDAANHMTPDWREAFENELQKLK
SLHGICSDKEWMDAVYESVRRVWRHMGKQVRDWRKDVRSGERPKIRGYAK
DVVGGNSIEQIEYLERQYKFLKSWSFFGKVSGQVIRAEKGSRFAITLREH
IDHAKEDRLKKLADRIIMEALGYVYALDERGKGKWVAKYPPCQLILLEEL
SEYQFNNDRPPSENNQLMQWSHRGVFQELINQAQVHDLLVGTMYAAFSSR
FDARTGAPGIRCRRVPARCTQEHNPEPFPWWLNKFVVEHTLDACPLRADD
LIPTGEGEIFVSPFSAEEGDFHQIHADLNAAQNLQQRLWSDFDISQIRLR
CDWGEVDGELVLIPRLTGKRTADSYSNKVFYTNTGVTYYERERGKKRRKV
FAQEKLSEEEAELLVEADEAREKSVVLMRDPSGIINRGNWTRQKEFWSMV
NQRIEGYLVKQIRSRVPLQDSACENTGDI

BhCas12b (Bacillus hisashii) NCBI Reference Sequence: WP 095142515

MAPKKKRKVGIHGVPAAATRSFILKIEPNEEVKKGLWKTHEVLNHGIAYY
MNILKLIRQEAIYEHHEQDPKNPKKVSKAEIQAELWDFVLKMQKCNSFTH
EVDKDEVFNILRELYEELVPSSVEKKGEANQLSNKFLYPLVDPNSQSGKG
TASSGRKPRWYNLKIAGDPSWEEEKKKWEEDKKKDPLAKILGKLAEYGLI
PLFIPYTDSNEPIVKEIKWMEKSRNQSVRRLDKDMFIQALERFLSWESWN
LKVKEEYEKVEKEYKTLEERIKEDIQALKALEQYEKERQEQLLRDTLNTN
EYRLSKRGLRGWREIIQKWLKMDENEPSEKYLEVFKDYQRKHPREAGDYS
VYEFLSKKENHFIWRNHPEYPYLYATFCEIDKKKKDAKQQATFTLADPIN
HPLWVRFEERSGSNLNKYRILTEQLHTEKLKKKLTVQLDRLIYPTESGGW
EEKGKVDIVLLPSRQFYNQIFLDIEEKGKHAFTYKDESIKFPLKGTLGGA
RVQFDRDHLRRYPHKVESGNVGRIYFNMTVNIEPTESPVSKSLKIHRDDF
PKVVNFKPKELTEWIKDSKGKKLKSGIESLEIGLRVMSIDLGQRQAAAAS
IFEVVDQKPDIEGKLFFPIKGTELYAVHRASFNIKLPGETLVKSREVLRK
AREDNLKLMNQKLNFLRNVLHFQQFEDITEREKRVTKWISRQENSDVPLV
YQDELIQIRELMYKPYKDWVAFLKQLHKRLEVEIGKEVKHWRKSLSDGRK
GLYGISLKNIDEIDRTRKFLLRWSLRPTEPGEVRRLEPGQRFAIDQLNHL
NALKEDRLKKMANTIIMHALGYCYDVRKKKWQAKNPACQIILFEDLSNYN
PYEERSRFENSKLMKWSRREIPRQVALQGEIYGLQVGEVGAQFSSRFHAK
TGSPGIRCSVVTKEKLQDNRFFKNLQREGRLTLDKIAVLKEGDLYPDKGG
EKFISLSKDRKCVTTHADINAAQNLQKRFWTRTHGFYKVYCKAYQVDGQT
VYIPESKDQKQKIIEEFGEGYFILKDGVYEWVNAGKLKIKKGSSKQSSSE
LVDSDILKDSFDLASELKGEKLMLYRDPSGNVFPSDKWMAAGVFFGKLER
ILISKLTNQYSISTIEDDSSKQSMKRPAATKKAGQAKKKK

[0267] In some embodiments, the Cas12b is BvCas12B, which is a variant of BhCas12b and comprises the following changes relative to BhCas12B: S893R, K846R, and E837G. BvCas12b (Bacillus sp. V3-13) NCBI Reference Sequence: WP_101661451.1

MAIRSIKLKMKTNSGTDSIYLRKALWRTHQLINEGIAYYMNLLTLYRQEA
IGDKTKEAYQAELINIIRNQQRNNGSSEEHGSDQEILALLRQLYELIIPS
SIGESGDANQLGNKFLYPLVDPNSQSGKGTSNAGRKPRWKRLKEEGNPDW
ELEKKKDEERKAKDPTVKIFDNLNKYGLLPLFPLFTNIQKDIEWLPLGKR
QSVRKWDKDMFIQAIERLLSWESWNRRVADEYKQLKEKTESYYKEHLTGG
EEWIEKIRKFEKERNMELEKNAFAPNDGYFITSRQIRGWDRVYEKWSKLP
ESASPEELWKVVAEQQNKMSEGFGDPKVFSFLANRENRDIWRGHSERIYH
IAAYNGLQKKLSRTKEQATFTLPDAIEHPLWIRYESPGGTNLNLFKLEEK
QKKNYYVTLSKIIWPSEEKWIEKENIEIPLAPSIQFNRQIKLKQHVKGKQ
EISFSDYSSRISLDGVLGGSRIQFNRKYIKNHKELLGEGDIGPVFFNLVV
DVAPLQETRNGRLQSPIGKALKVISSDFSKVIDYKPKELMDWMNTGSASN
SFGVASLLEGMRVMSIDMGQRTSASVSIFEVVKELPKDQEQKLFYSINDT
ELFAIHKRSFLLNLPGEVVTKNNKQQRQERRKKRQFVRSQIRMLANVLRL
ETKKTPDERKKAIHKLMEIVQSYDSWTASQKEVWEKELNLLTNMAAFNDE
IWKESLVELHHRIEPYVGQIVSKWRKGLSEGRKNLAGISMWNIDELEDTR
RLLISWSKRSRTPGEANRIETDEPFGSSLLQHIQNVKDDRLKQMANLIIM
TALGFKYDKEEKDRYKRWKETYPACQIILFENLNRYLFNLDRSRRENSRL
MKWAHRSIPRTVSMQGEMFGLQVGDVRSEYSSRFHAKTGAPGIRCHALTE
EDLKAGSNTLKRLIEDGFINESELAYLKKGDIIPSQGGELFVTLSKRYKK
DSDNNELTVIHADINAAQNLQKRFWQQNSEVYRVPCQLARMGEDKLYIPK
SQTETIKKYFGKGSFVKNNTEQEVYKWEKSEKMKIKTDTTFDLQDLDGFE
DISKTIELAQEQQKKYLTMFRDPSGYFFNNETWRPQKEYWSIVNNIIKSC
LKKKILSNKVEL

[0268] The Cas9 nuclease has two functional endonuclease domains: RuvC and HNH. Cas9 undergoes a conformational change upon target binding that positions the nuclease domains to cleave opposite strands of the target DNA. The end result of Cas9-mediated DNA cleavage is a double-strand break (DSB) within the target DNA (˜3-4 nucleotides upstream of the PAM sequence). The resulting DSB is then repaired by one of two general repair pathways: (1) the efficient but error-prone non-homologous end joining (NHEJ) pathway; or (2) the less efficient but high-fidelity homology directed repair (HDR) pathway.

[0269] The “efficiency” of non-homologous end joining (NHEJ) and/or homology directed repair (HDR) can be calculated by any convenient method. For example, in some cases, efficiency can be expressed in terms of percentage of successful HDR. For example, a surveyor nuclease assay can be used to generate cleavage products and the ratio of products to substrate can be used to calculate the percentage. For example, a surveyor nuclease enzyme can be used that directly cleaves DNA containing a newly integrated restriction sequence as the result of successful HDR. More cleaved substrate indicates a greater percent HDR (a greater efficiency of HDR). As an illustrative example, a fraction (percentage) of HDR can be calculated using the following equation [(cleavage products)/(substrate plus cleavage products)] (e.g., (b+c)/(a+b+c), where “a” is the band intensity of DNA substrate and “b” and “c” are the cleavage products).

[0270] In some cases, efficiency can be expressed in terms of percentage of successful NHEJ. For example, a T7 endonuclease I assay can be used to generate cleavage products and the ratio of products to substrate can be used to calculate the percentage NHEJ. T7 endonuclease I cleaves mismatched heteroduplex DNA which arises from hybridization of wild-type and mutant DNA strands (NHEJ generates small random insertions or deletions (indels) at the site of the original break). More cleavage indicates a greater percent NHEJ (a greater efficiency of NHEJ). As an illustrative example, a fraction (percentage) of NHEJ can be calculated using the following equation: (1−(1−(b+c)/(a+b+c))^{1/2})×100, where “a” is the band intensity of DNA substrate and “b” and “c” are the cleavage products (Ran et. al., Cell. 2013 Sep. 12; 154(6):1380-9; and Ran et al., Nat Protoc. 2013 November; 8(11): 2281-2308).

[0271] The NHEJ repair pathway is the most active repair mechanism, and it frequently causes small nucleotide insertions or deletions (indels) at the DSB site. The randomness of NHEJ-mediated DSB repair has important practical implications, because a population of cells expressing Cas9 and a gRNA or a guide polynucleotide can result in a diverse array of mutations. In most cases, NHEJ gives rise to small indels in the target DNA that result in amino acid deletions, insertions, or frameshift mutations leading to premature stop codons within the open reading frame (ORF) of the targeted gene. The ideal end result is a loss-of-function mutation within the targeted gene.

[0272] While NHEJ-mediated DSB repair often disrupts the open reading frame of the gene, homology directed repair (HDR) can be used to generate specific nucleotide changes ranging from a single nucleotide change to large insertions like the addition of a fluorophore or tag. In order to utilize HDR for gene editing, a DNA repair template containing the desired sequence can be delivered into the cell type of interest with the gRNA(s) and Cas9 or Cas9 nickase. The repair template can contain the desired edit as well as additional homologous sequence immediately upstream and downstream of the target (termed left & right homology arms). The length of each homology arm can be dependent on the size of the change being introduced, with larger insertions requiring longer homology arms. The repair template can be a single-stranded oligonucleotide, double-stranded oligonucleotide, or a double-stranded DNA plasmid. The efficiency of HDR is generally low (<10% of modified alleles) even in cells that express Cas9, gRNA and an exogenous repair template. The efficiency of HDR can be enhanced by synchronizing the cells, since HDR takes place during the S and G2 phases of the cell cycle. Chemically or genetically inhibiting genes involved in NHEJ can also increase HDR frequency.

[0273] In some embodiments, Cas9 is a modified Cas9. A given gRNA targeting sequence can have additional sites throughout the genome where partial homology exists. These sites are called off-targets and need to be considered when designing a gRNA. In addition to optimizing gRNA design, CRISPR specificity can also be increased through modifications to Cas9. Cas9 generates double-strand breaks (DSBs) through the combined activity of two nuclease domains, RuvC and HNH. Cas9 nickase, a D10A mutant of SpCas9, retains one nuclease domain and generates a DNA nick rather than a DSB. The nickase system can also be combined with HDR-mediated gene editing for specific gene edits.

[0274] In some cases, Cas9 is a variant Cas9 protein. A variant Cas9 polypeptide has an amino acid sequence that is different by one amino acid (e.g., has a deletion, insertion, substitution, fusion) when compared to the amino acid sequence of a wild type Cas9 protein. In some instances, the variant Cas9 polypeptide has an amino acid change (e.g., deletion, insertion, or substitution) that reduces the nuclease activity of the Cas9 polypeptide. For example, in some instances, the variant Cas9 polypeptide has less than 50%, less than 40%, less than 30%, less than 20%, less than 10%, less than 5%, or less than 1% of the nuclease activity of the corresponding wild-type Cas9 protein. In some cases, the variant Cas9 protein has no substantial nuclease activity. When a subject Cas9 protein is a variant Cas9 protein that has no substantial nuclease activity, it can be referred to as “dCas9.”

[0275] In some cases, a variant Cas9 protein has reduced nuclease activity. For example, a variant Cas9 protein exhibits less than about 20%, less than about 15%, less than about 10%, less than about 5%, less than about 1%, or less than about 0.1%, of the endonuclease activity of a wild-type Cas9 protein, e.g., a wild-type Cas9 protein.

[0276] In some cases, a variant Cas9 protein can cleave the complementary strand of a guide target sequence but has reduced ability to cleave the non-complementary strand of a double stranded guide target sequence. For example, the variant Cas9 protein can have a mutation (amino acid substitution) that reduces the function of the RuvC domain. As a non-limiting example, in some embodiments, a variant Cas9 protein has a D10A (aspartate to alanine at amino acid position 10) and can therefore cleave the complementary strand of a double stranded guide target sequence but has reduced ability to cleave the non-complementary strand of a double stranded guide target sequence (thus resulting in a single strand break (SSB) instead of a double strand break (DSB) when the variant Cas9 protein cleaves a double stranded target nucleic acid) (see, for example, Jinek et al., Science. 2012 Aug. 17; 337(6096):816-21).

[0277] In some cases, a variant Cas9 protein can cleave the non-complementary strand of a double stranded guide target sequence but has reduced ability to cleave the complementary strand of the guide target sequence. For example, the variant Cas9 protein can have a mutation (amino acid substitution) that reduces the function of the HNH domain (RuvC/HNH/RuvC domain motifs). As a non-limiting example, in some embodiments, the variant Cas9 protein has an H840A (histidine to alanine at amino acid position 840) mutation and can therefore cleave the non-complementary strand of the guide target sequence but has reduced ability to cleave the complementary strand of the guide target sequence (thus resulting in a SSB instead of a DSB when the variant Cas9 protein cleaves a double stranded guide target sequence). Such a Cas9 protein has a reduced ability to cleave a guide target sequence (e.g., a single stranded guide target sequence) but retains the ability to bind a guide target sequence (e.g., a single stranded guide target sequence).

[0278] In some cases, a variant Cas9 protein has a reduced ability to cleave both the complementary and the non-complementary strands of a double stranded target DNA. As a non-limiting example, in some cases, the variant Cas9 protein harbors both the D10A and the H840A mutations such that the polypeptide has a reduced ability to cleave both the complementary and the non-complementary strands of a double stranded target DNA. Such a Cas9 protein has a reduced ability to cleave a target DNA (e.g., a single stranded target DNA) but retains the ability to bind a target DNA (e.g., a single stranded target DNA).

[0279] As another non-limiting example, in some cases, the variant Cas9 protein harbors W476A and W1126A mutations such that the polypeptide has a reduced ability to cleave a target DNA. Such a Cas9 protein has a reduced ability to cleave a target DNA (e.g., a single stranded target DNA) but retains the ability to bind a target DNA (e.g., a single stranded target DNA).

[0280] As another non-limiting example, in some cases, the variant Cas9 protein harbors P475A, W476A, N477A, D1125A, W1126A, and D1127A mutations such that the polypeptide has a reduced ability to cleave a target DNA. Such a Cas9 protein has a reduced ability to cleave a target DNA (e.g., a single stranded target DNA) but retains the ability to bind a target DNA (e.g., a single stranded target DNA).

[0281] As another non-limiting example, in some cases, the variant Cas9 protein harbors H840A, W476A, and W1126A, mutations such that the polypeptide has a reduced ability to cleave a target DNA. Such a Cas9 protein has a reduced ability to cleave a target DNA (e.g., a single stranded target DNA) but retains the ability to bind a target DNA (e.g., a single stranded target DNA). As another non-limiting example, in some cases, the variant Cas9 protein harbors H840A, D10A, W476A, and W1126A, mutations such that the polypeptide has a reduced ability to cleave a target DNA. Such a Cas9 protein has a reduced ability to cleave a target DNA (e.g., a single stranded target DNA) but retains the ability to bind a target DNA (e.g., a single stranded target DNA). In some embodiments, the variant Cas9 has restored catalytic His residue at position 840 in the Cas9 HNH domain (A840H).

[0282] As another non-limiting example, in some cases, the variant Cas9 protein harbors, H840A, P475A, W476A, N477A, D1125A, W1126A, and D1127A mutations such that the polypeptide has a reduced ability to cleave a target DNA. Such a Cas9 protein has a reduced ability to cleave a target DNA (e.g., a single stranded target DNA) but retains the ability to bind a target DNA (e.g., a single stranded target DNA). As another non-limiting example, in some cases, the variant Cas9 protein harbors D10A, H840A, P475A, W476A, N477A, D1125A, W1126A, and D1127A mutations such that the polypeptide has a reduced ability to cleave a target DNA. Such a Cas9 protein has a reduced ability to cleave a target DNA (e.g., a single stranded target DNA) but retains the ability to bind a target DNA (e.g., a single stranded target DNA). In some cases, when a variant Cas9 protein harbors W476A and W1126A mutations or when the variant Cas9 protein harbors P475A, W476A, N477A, D1125A, W1126A, and D1127A mutations, the variant Cas9 protein does not bind efficiently to a PAM sequence. Thus, in some such cases, when such a variant Cas9 protein is used in a method of binding, the method does not require a PAM sequence. In other words, in some cases, when such a variant Cas9 protein is used in a method of binding, the method can include a guide RNA, but the method can be performed in the absence of a PAM sequence (and the specificity of binding is therefore provided by the targeting segment of the guide RNA). Other residues can be mutated to achieve the above effects (i.e., inactivate one or the other nuclease portions). As non-limiting examples, residues D10, G12, G17, E762, H840, N854, N863, H982, H983, A984, D986, and/or A987 can be altered (i.e., substituted). Also, mutations other than alanine substitutions are suitable.

[0283] In some embodiments, a variant Cas9 protein that has reduced catalytic activity (e.g., when a Cas9 protein has a D10, G12, G17, E762, H840, N854, N863, H982, H983, A984, D986, and/or a A987 mutation, e.g., D10A, G12A, G17A, E762A, H840A, N854A, N863A, H982A, H983A, A984A, and/or D986A), the variant Cas9 protein can still bind to target DNA in a site-specific manner (because it is still guided to a target DNA sequence by a guide RNA) as long as it retains the ability to interact with the guide RNA.

[0284] In some embodiments, the variant Cas protein can be spCas9, spCas9-VRQR, spCas9-VRER, xCas9 (sp), saCas9, saCas9-KKH, spCas9-MQKSER, spCas9-LRKIQK, or spCas9-LRVSQL.

[0285] In some embodiments, a modified SpCas9 including amino acid substitutions D1135M, S1136Q, G1218K, E1219F, A1322R, D1332A, R1335E, and T1337R (SpCas9-MQKFRAER) and having specificity for the altered PAM 5′-NGC-3′ was used.

[0286] Alternatives to S. pyogenes Cas9 can include RNA-guided endonucleases from the Cpf1 family that display cleavage activity in mammalian cells. CRISPR from Prevotella and Francisella I (CRISPR/Cpf1) is a DNA-editing technology analogous to the CRISPR/Cas9 system. Cpf1 is an RNA-guided endonuclease of a class II CRISPR/Cas system. This acquired immune mechanism is found in Prevotella and Francisella bacteria. Cpf1 genes are associated with the CRISPR locus, coding for an endonuclease that use a guide RNA to find and cleave viral DNA. Cpf1 is a smaller and simpler endonuclease than Cas9, overcoming some of the CRISPR/Cas9 system limitations. Unlike Cas9 nucleases, the result of Cpf1-mediated DNA cleavage is a double-strand break with a short 3′ overhang. Cpf1's staggered III cleavage pattern can open up the possibility of directional gene transfer, analogous to traditional restriction enzyme cloning, which can increase the efficiency of gene editing. Like the Cas9 variants and orthologues described above, Cpf1 can also expand the number of sites that can be targeted by CRISPR to AT-rich regions or AT-rich genomes that lack the NGG PAM sites favored by SpCas9. The Cpf1 locus contains a mixed alpha/beta domain, a RuvC-I followed by a helical region, a RuvC-II and a zinc finger-like domain. The Cpf1 protein has a RuvC-like endonuclease domain that is similar to the RuvC domain of Cas9. Furthermore, Cpf1 does not have a HNH endonuclease domain, and the N-terminal of Cpf1 does not have the alpha-helical recognition lobe of Cas9. Cpf1 CRISPR-Cas domain architecture shows that Cpf1 is functionally unique, being classified as Class 2, type V CRISPR system. The Cpf1 loci encode Cas1, Cas2 and Cas4 proteins more similar to types I and III than from type II systems. Functional Cpf1 doesn't need the trans-activating CRISPR RNA (tracrRNA), therefore, only CRISPR (crRNA) is required. This benefits genome editing because Cpf1 is not only smaller than Cas9, but also it has a smaller sgRNA molecule (proximately half as many nucleotides as Cas9). The Cpf1-crRNA complex cleaves target DNA or RNA by identification of a protospacer adjacent motif 5′-YTN-3′ in contrast to the G-rich PAM targeted by Cas9. After identification of PAM, Cpf1 introduces a sticky-end-like DNA double-stranded break of 4 or 5 nucleotides overhang.

[0287] Some aspects of the disclosure provide fusion proteins comprising domains that act as nucleic acid programmable DNA binding proteins, which may be used to guide a protein, such as a base editor, to a specific nucleic acid (e.g., DNA or RNA) sequence. In particular embodiments, a fusion protein comprises a nucleic acid programmable DNA binding protein domain and a deaminase domain. DNA binding proteins include, without limitation, Cas9 (e.g., dCas9 and nCas9), Cas12a/Cpf1, Cas12b/C2c1, Cas12c/C2c3, Cas12d/CasY, Cas12e/CasX, Cas12g, Cas12h, and Cas12i. One example of a programmable polynucleotide-binding protein that has different PAM specificity than Cas9 is Clustered Regularly Interspaced Short Palindromic Repeats from Prevotella and Francisella 1 (Cpf1). Similar to Cas9, Cpf1 is also a class 2 CRISPR effector. It has been shown that Cpf1 mediates robust DNA interference with features distinct from Cas9. Cpf1 is a single RNA-guided endonuclease lacking tracrRNA, and it utilizes a T-rich protospacer-adjacent motif (TTN, TTTN, or YTN). Moreover, Cpf1 cleaves DNA via a staggered DNA double-stranded break. Out of 16 Cpf1-family proteins, two enzymes from Acidaminococcus and Lachnospiraceae are shown to have efficient genome-editing activity in human cells. Cpf1 proteins are known in the art and have been described previously, for example Yamano et al., “Crystal structure of Cpf1 in complex with guide RNA and target DNA.” Cell (165) 2016, p. 949-962; the entire contents of which is hereby incorporated by reference.

[0288] Also useful in the present compositions and methods are nuclease-inactive Cpf1 (dCpf1) variants that may be used as a guide nucleotide sequence-programmable polynucleotide-binding protein domain. The Cpf1 protein has a RuvC-like endonuclease domain that is similar to the RuvC domain of Cas9 but does not have a HNH endonuclease domain, and the N-terminal of Cpf1 does not have the alfa-helical recognition lobe of Cas9. It was shown in Zetsche et al., Cell, 163, 759-771, 2015 (which is incorporated herein by reference) that, the RuvC-like domain of Cpf1 is responsible for cleaving both DNA strands and inactivation of the RuvC-like domain inactivates Cpf1 nuclease activity. For example, mutations corresponding to D917A, E1006A, or D1255A in Francisella novicida Cpf1 inactivate Cpf1 nuclease activity. In some embodiments, the dCpf1 of the present disclosure comprises mutations corresponding to D917A, E1006A, D1255A, D917A/E1006A, D917A/D1255A, E1006A/D1255A, or D917A/E1006A/D1255A. It is to be understood that any mutations, e.g., substitution mutations, deletions, or insertions that inactivate the RuvC domain of Cpf1, may be used in accordance with the present disclosure.

[0289] In some embodiments, the nucleic acid programmable nucleotide binding protein of any of the fusion proteins provided herein may be a Cpf1 protein. In some embodiments, the Cpf1 protein is a Cpf1 nickase (nCpf1). In some embodiments, the Cpf1 protein is a nuclease inactive Cpf1 (dCpf1). In some embodiments, the Cpf1, the nCpf1, or the dCpf1 comprises an amino acid sequence that is at least 85%, at least 90%, at least 91%, at least 92%, at least 93%, at least 94%, at least 95%, at least 96%, at least 97%, at least 98%, at least 99%, or at least 99.5% identical to a Cpf1 sequence disclosed herein. In some embodiments, the dCpf1 comprises an amino acid sequence that is at least 85%, at least 90%, at least 91%, at least 92%, at least 93%, at least 94%, at least 95%, at least 96%, at least 97%, at least 98%, at least 99%, or at ease 99.5% identical to a Cpf1 sequence disclosed herein, and comprises mutations corresponding to D917A, E1006A, D1255A, D917A/E1006A, D917A/D1255A, E1006A/D1255A, or D917A/E1006A/D1255A. It should be appreciated that Cpf1 from other bacterial species may also be used in accordance with the present disclosure.

[0290] The amino acid sequence of wild type Francisella novicida Cpf1 follows. D917, E1006, and D1255 are bolded and underlined.

MSIYQEFVNKYSLSKTLRFELIPQGKTLENIKARGLILDDEKRAKDYKKA
KQIIDKYHQFFIEEILSSVCISEDLLQNYSDVYFKLKKSDDDNLQKDFKS
AKDTIKKQISEYIKDSEKFKNLFNQNLIDAKKGQESDLILWLKQSKDNGI
ELFKANSDITDIDEALEIIKSFKGWTTYFKGFHENRKNVYSSNDIPTSII
YRIVDDNLPKFLENKAKYESLKDKAPEAINYEQIKKDLAEELTFDIDYKT
SEVNQRVFSLDEVFEIANFNNYLNQSGITKFNTIIGGKFVNGENTKRKGI
NEYINLYSQQINDKTLKKYKMSVLFKQILSDTESKSFVIDKLEDDSDVVT
TMQSFYEQIAAFKTVEEKSIKETLSLLFDDLKAQKLDLSKIYFKNDKSLT
DLSQQVFDDYSVIGTAVLEYITQQIAPKNLDNPSKKEQELIAKKTEKAKY
LSLETIKLALEEFNKHRDIDKQCRFEEILANFAAIPMIFDEIAQNKDNLA
QISIKYQNQGKKDLLQASAEDDVKAIKDLLDQTNNLLHKLKIFHISQSED
KANILDKDEHFYLVFEECYFELANIVPLYNKIRNYITQKPYSDEKFKLNF
ENSTLANGWDKNKEPDNTAILFIKDDKYYLGVMNKKNNKIFDDKAIKENK
GEGYKKIVYKLLPGANKMLPKVFFSAKSIKFYNPSEDILRIRNHSTHTKN
GSPQKGYEKFEFNIEDCRKFIDFYKQSISKHPEWKDFGFRFSDTQRYNSI
DEFYREVENQGYKLTFENISESYIDSVVNQGKLYLFQIYNKDFSAYSKGR
PNLHTLYWKALFDERNLQDVVYKLNGEAELFYRKQSIPKKITHPAKEAIA
NKNKDNPKKESVFEYDLIKDKRFTEDKFFFHCPITINFKSSGANKFNDEI
NLLLKEKANDVHILSIDRGERHLAYYTLVDGKGNIIKQDTFNIIGNDRMK
TNYHDKLAAIEKDRDSARKDWKKINNIKEMKEGYLSQVVHEIAKLVIEYN
AIVVFEDLNFGFKRGRFKVEKQVYQKLEKMLIEKLNYLVFKDNEFDKTGG
VLRAYQLTAPFETFKKMGKQTGIIYYVPAGFTSKICPVTGFVNQLYPKYE
SVSKSQEFFSKFDKICYNLDKGYFEFSFDYKNFGDKAAKGKWTIASFGSR
LINFRNSDKNHNWDTREVYPTKELEKLLKDYSIEYGHGECIKAAICGESD
KKFFAKLTSVLNTILQMRNSKTGTELDYLISPVADVNGNFFDSRQAPKNM
PQDADANGAYHIGLKGLMLLGRIKNNQEGKKLNLVIKNEEYFEFVQNRN
N.

[0291] The amino acid sequence of Francisella novicida Cpf1 D917A follows. (A917, E1006, and D1255 are bolded and underlined).

MSIYQEFVNKYSLSKTLRFELIPQGKTLENIKARGLILDDEKRAKDYKK
AKQIIDKYHQFFIEEILSSVCISEDLLQNYSDVYFKLKKSDDDNLQKDF
KSAKDTIKKQISEYIKDSEKFKNLFNQNLIDAKKGQESDLILWLKQSKD
NGIELFKANSDITDIDEALEIIKSFKGWTTYFKGFHENRKNVYSSNDIP
TSIIYRIVDDNLPKFLENKAKYESLKDKAPEAINYEQIKKDLAEELTFD
IDYKTSEVNQRVFSLDEVFEIANFNNYLNQSGITKFNTIIGGKFVNGEN
TKRKGINEYINLYSQQINDKTLKKYKMSVLFKQILSDTESKSFVIDKLE
DDSDVVTTMQSFYEQIAAFKTVEEKSIKETLSLLFDDLKAQKLDLSKIY
FKNDKSLTDLSQQVFDDYSVIGTAVLEYITQQIAPKNLDNPSKKEQELI
AKKTEKAKYLSLETIKLALEEFNKHRDIDKQCRFEEILANFAAIPMIFD
EIAQNKDNLAQISIKYQNQGKKDLLQASAEDDVKAIKDLLDQTNNLLHK
LKIFHISQSEDKANILDKDEHFYLVFEECYFELANIVPLYNKIRNYITQ
KPYSDEKFKLNFENSTLANGWDKNKEPDNTAILFIKDDKYYLGVMNKKN
NKIFDDKAIKENKGEGYKKIVYKLLPGANKMLPKVFFSAKSIKFYNPSE
DILRIRNHSTHTKNGSPQKGYEKFEFNIEDCRKFIDFYKQSISKHPEWK
DFGFRFSDTQRYNSIDEFYREVENQGYKLTFENISESYIDSVVNQGKLY
LFQIYNKDFSAYSKGRPNLHTLYWKALFDERNLQDVVYKLNGEAELFYR
KQSIPKKITHPAKEAIANKNKDNPKKESVFEYDLIKDKRFTEDKFFFHC
PITINFKSSGANKFNDEINLLLKEKANDVHILSIARGERHLAYYTLVDG
KGNIIKQDTFNIIGNDRMKTNYHDKLAAIEKDRDSARKDWKKINNIKEM
KEGYLSQVVHEIAKLVIEYNAIVVFEDLNFGFKRGRFKVEKQVYQKLEK
MLIEKLNYLVFKDNEFDKTGGVLRAYQLTAPFETFKKMGKQTGIIYYVP
AGFTSKICPVTGFVNQLYPKYESVSKSQEFFSKFDKICYNLDKGYFEFS
FDYKNFGDKAAKGKWTIASFGSRLINFRNSDKNHNWDTREVYPTKELEK
LLKDYSIEYGHGECIKAAICGESDKKFFAKLTSVLNTILQMRNSKTGTE
LDYLISPVADVNGNFFDSRQAPKNMPQDADANGAYHIGLKGLMLLGRIK
NNQEGKKLNLVIKNEEYFEFVQNRNN.

[0292] The amino acid sequence of Francisella novicida Cpf1 E1006A follows. (D917, A1006, and D1255 are bolded and underlined).

MSIYQEFVNKYSLSKTLRFELIPQGKTLENIKARGLILDDEKRAKDYKK
AKQIIDKYHQFFIEEILSSVCISEDLLQNYSDVYFKLKKSDDDNLQKDF
KSAKDTIKKQISEYIKDSEKFKNLFNQNLIDAKKGQESDLILWLKQSKD
NGIELFKANSDITDIDEALEIIKSFKGWTTYFKGFHENRKNVYSSNDIP
TSIIYRIVDDNLPKFLENKAKYESLKDKAPEAINYEQIKKDLAEELTFD
IDYKTSEVNQRVFSLDEVFEIANFNNYLNQSGITKFNTIIGGKFVNGEN
TKRKGINEYINLYSQQINDKTLKKYKMSVLFKQILSDTESKSFVIDKLE
DDSDVVTTMQSFYEQIAAFKTVEEKSIKETLSLLFDDLKAQKLDLSKIY
FKNDKSLTDLSQQVFDDYSVIGTAVLEYITQQIAPKNLDNPSKKEQELI
AKKTEKAKYLSLETIKLALEEFNKHRDIDKQCRFEEILANFAAIPMIFD
EIAQNKDNLAQISIKYQNQGKKDLLQASAEDDVKAIKDLLDQTNNLLHK
LKIFHISQSEDKANILDKDEHFYLVFEECYFELANIVPLYNKIRNYITQ
KPYSDEKFKLNFENSTLANGWDKNKEPDNTAILFIKDDKYYLGVMNKKN
NKIFDDKAIKENKGEGYKKIVYKLLPGANKMLPKVFFSAKSIKFYNPSE
DILRIRNHSTHTKNGSPQKGYEKFEFNIEDCRKFIDFYKQSISKHPEWK
DFGFRFSDTQRYNSIDEFYREVENQGYKLTFENISESYIDSVVNQGKLY
LFQIYNKDFSAYSKGRPNLHTLYWKALFDERNLQDVVYKLNGEAELFYR
KQSIPKKITHPAKEAIANKNKDNPKKESVFEYDLIKDKRFTEDKFFFHC
PITINFKSSGANKFNDEINLLLKEKANDVHILSIDRGERHLAYYTLVDG
KGNIIKQDTFNIIGNDRMKTNYHDKLAAIEKDRDSARKDWKKINNIKEM
KEGYLSQVVHEIAKLVIEYNAIVVFADLNFGFKRGRFKVEKQVYQKLEK
MLIEKLNYLVFKDNEFDKTGGVLRAYQLTAPFETFKKMGKQTGIIYYVP
AGFTSKICPVTGFVNQLYPKYESVSKSQEFFSKFDKICYNLDKGYFEFS
FDYKNFGDKAAKGKWTIASFGSRLINFRNSDKNHNWDTREVYPTKELEK
LLKDYSIEYGHGECIKAAICGESDKKFFAKLTSVLNTILQMRNSKTGTE
LDYLISPVADVNGNFFDSRQAPKNMPQDADANGAYHIGLKGLMLLGRIK
NNQEGKKLNLVIKNEEYFEFVQNRNN.

[0293] The amino acid sequence of Francisella novicida Cpf1 D1255A follows. (D917, E1006 and A1255 mutation positions are bolded and underlined).

MSIYQEFVNKYSLSKTLRFELIPQGKTLENIKARGLILDDEKRAKDYKK
AKQIIDKYHQFFIEEILSSVCISEDLLQNYSDVYFKLKKSDDDNLQKDF
KSAKDTIKKQISEYIKDSEKFKNLFNQNLIDAKKGQESDLILWLKQSKD
NGIELFKANSDITDIDEALEIIKSFKGWTTYFKGFHENRKNVYSSNDIP
TSIIYRIVDDNLPKFLENKAKYESLKDKAPEAINYEQIKKDLAEELTFD
IDYKTSEVNQRVFSLDEVFEIANFNNYLNQSGITKFNTIIGGKFVNGEN
TKRKGINEYINLYSQQINDKTLKKYKMSVLFKQILSDTESKSFVIDKLE
DDSDVVTTMQSFYEQIAAFKTVEEKSIKETLSLLFDDLKAQKLDLSKIY
FKNDKSLTDLSQQVFDDYSVIGTAVLEYITQQIAPKNLDNPSKKEQELI
AKKTEKAKYLSLETIKLALEEFNKHRDIDKQCRFEEILANFAAIPMIFD
EIAQNKDNLAQISIKYQNQGKKDLLQASAEDDVKAIKDLLDQTNNLLHK
LKIFHISQSEDKANILDKDEHFYLVFEECYFELANIVPLYNKIRNYITQ
KPYSDEKFKLNFENSTLANGWDKNKEPDNTAILFIKDDKYYLGVMNKKN
NKIFDDKAIKENKGEGYKKIVYKLLPGANKMLPKVFFSAKSIKFYNPSE
DILRIRNHSTHTKNGSPQKGYEKFEFNIEDCRKFIDFYKQSISKHPEWK
DFGFRFSDTQRYNSIDEFYREVENQGYKLTFENISESYIDSVVNQGKLY
LFQIYNKDFSAYSKGRPNLHTLYWKALFDERNLQDVVYKLNGEAELFYR
KQSIPKKITHPAKEAIANKNKDNPKKESVFEYDLIKDKRFTEDKFFFHC
PITINFKSSGANKFNDEINLLLKEKANDVHILSIDRGERHLAYYTLVDG
KGNIIKQDTFNIIGNDRMKTNYHDKLAAIEKDRDSARKDWKKINNIKEM
KEGYLSQVVHEIAKLVIEYNAIVVFEDLNFGFKRGRFKVEKQVYQKLEK
MLIEKLNYLVFKDNEFDKTGGVLRAYQLTAPFETFKKMGKQTGIIYYVP
AGFTSKICPVTGFVNQLYPKYESVSKSQEFFSKFDKICYNLDKGYFEFS
FDYKNFGDKAAKGKWTIASFGSRLINFRNSDKNHNWDTREVYPTKELEK
LLKDYSIEYGHGECIKAAICGESDKKFFAKLTSVLNTILQMRNSKTGTE
LDYLISPVADVNGNFFDSRQAPKNMPQDAAANGAYHIGLKGLMLLGRIK
NNQEGKKLNLVIKNEEYFEFVQNRNN

[0294] The amino acid sequence of Francisella novicida Cpf1 D917A/E1006A follows. (A917, A1006, and D1255 are bolded and underlined).

MSIYQEFVNKYSLSKTLRFELIPQGKTLENIKARGLILDDEKRAKDYKK
AKQIIDKYHQFFIEEILSSVCISEDLLQNYSDVYFKLKKSDDDNLQKDF
KSAKDTIKKQISEYIKDSEKFKNLFNQNLIDAKKGQESDLILWLKQSKD
NGIELFKANSDITDIDEALEIIKSFKGWTTYFKGFHENRKNVYSSNDIP
TSIIYRIVDDNLPKFLENKAKYESLKDKAPEAINYEQIKKDLAEELTFD
IDYKTSEVNQRVFSLDEVFEIANFNNYLNQSGITKFNTIIGGKFVNGEN
TKRKGINEYINLYSQQINDKTLKKYKMSVLFKQILSDTESKSFVIDKLE
DDSDVVTTMQSFYEQIAAFKTVEEKSIKETLSLLFDDLKAQKLDLSKIY
FKNDKSLTDLSQQVFDDYSVIGTAVLEYITQQIAPKNLDNPSKKEQELI
AKKTEKAKYLSLETIKLALEEFNKHRDIDKQCRFEEILANFAAIPMIFD
EIAQNKDNLAQISIKYQNQGKKDLLQASAEDDVKAIKDLLDQTNNLLHK
LKIFHISQSEDKANILDKDEHFYLVFEECYFELANIVPLYNKIRNYITQ
KPYSDEKFKLNFENSTLANGWDKNKEPDNTAILFIKDDKYYLGVMNKKN
NKIFDDKAIKENKGEGYKKIVYKLLPGANKMLPKVFFSAKSIKFYNPSE
DILRIRNHSTHTKNGSPQKGYEKFEFNIEDCRKFIDFYKQSISKHPEWK
DFGFRFSDTQRYNSIDEFYREVENQGYKLTFENISESYIDSVVNQGKLY
LFQIYNKDFSAYSKGRPNLHTLYWKALFDERNLQDVVYKLNGEAELFYR
KQSIPKKITHPAKEAIANKNKDNPKKESVFEYDLIKDKRFTEDKFFFHC
PITINFKSSGANKFNDEINLLLKEKANDVHILSIARGERHLAYYTLVDG
KGNIIKQDTFNIIGNDRMKTNYHDKLAAIEKDRDSARKDWKKINNIKEM
KEGYLSQVVHEIAKLVIEYNAIVVFADLNFGFKRGRFKVEKQVYQKLEK
MLIEKLNYLVFKDNEFDKTGGVLRAYQLTAPFETFKKMGKQTGIIYYVP
AGFTSKICPVTGFVNQLYPKYESVSKSQEFFSKFDKICYNLDKGYFEFS
FDYKNFGDKAAKGKWTIASFGSRLINFRNSDKNHNWDTREVYPTKELEK
LLKDYSIEYGHGECIKAAICGESDKKFFAKLTSVLNTILQMRNSKTGTE
LDYLISPVADVNGNFFDSRQAPKNMPQDADANGAYHIGLKGLMLLGRIK
NNQEGKKLNLVIKNEEYFEFVQNRNN.

[0295] The amino acid sequence of Francisella novicida Cpf1 D917A/D1255A follows. (A917, E1006, and A1255 are bolded and underlined).

MSIYQEFVNKYSLSKTLRFELIPQGKTLENIKARGLILDDEKRAKDYKK
AKQIIDKYHQFFIEEILSSVCISEDLLQNYSDVYFKLKKSDDDNLQKDF
KSAKDTIKKQISEYIKDSEKFKNLFNQNLIDAKKGQESDLILWLKQSKD
NGIELFKANSDITDIDEALEIIKSFKGWTTYFKGFHENRKNVYSSNDIP
TSIIYRIVDDNLPKFLENKAKYESLKDKAPEAINYEQIKKDLAEELTFD
IDYKTSEVNQRVFSLDEVFEIANFNNYLNQSGITKFNTIIGGKFVNGEN
TKRKGINEYINLYSQQINDKTLKKYKMSVLFKQILSDTESKSFVIDKLE
DDSDVVTTMQSFYEQIAAFKTVEEKSIKETLSLLFDDLKAQKLDLSKIY
FKNDKSLTDLSQQVFDDYSVIGTAVLEYITQQIAPKNLDNPSKKEQELI
AKKTEKAKYLSLETIKLALEEFNKHRDIDKQCRFEEILANFAAIPMIFD
EIAQNKDNLAQISIKYQNQGKKDLLQASAEDDVKAIKDLLDQTNNLLHK
LKIFHISQSEDKANILDKDEHFYLVFEECYFELANIVPLYNKIRNYITQ
KPYSDEKFKLNFENSTLANGWDKNKEPDNTAILFIKDDKYYLGVMNKKN
NKIFDDKAIKENKGEGYKKIVYKLLPGANKMLPKVFFSAKSIKFYNPSE
DILRIRNHSTHTKNGSPQKGYEKFEFNIEDCRKFIDFYKQSISKHPEWK
DFGFRFSDTQRYNSIDEFYREVENQGYKLTFENISESYIDSVVNQGKLY
LFQIYNKDFSAYSKGRPNLHTLYWKALFDERNLQDVVYKLNGEAELFYR
KQSIPKKITHPAKEAIANKNKDNPKKESVFEYDLIKDKRFTEDKFFFHC
PITINFKSSGANKFNDEINLLLKEKANDVHILSIARGERHLAYYTLVDG
KGNIIKQDTFNIIGNDRMKTNYHDKLAAIEKDRDSARKDWKKINNIKEM
KEGYLSQVVHEIAKLVIEYNAIVVFEDLNFGFKRGRFKVEKQVYQKLEK
MLIEKLNYLVFKDNEFDKTGGVLRAYQLTAPFETFKKMGKQTGIIYYVP
AGFTSKICPVTGFVNQLYPKYESVSKSQEFFSKFDKICYNLDKGYFEFS
FDYKNFGDKAAKGKWTIASFGSRLINFRNSDKNHNWDTREVYPTKELEK
LLKDYSIEYGHGECIKAAICGESDKKFFAKLTSVLNTILQMRNSKTGTE
LDYLISPVADVNGNFFDSRQAPKNMPQDAAANGAYHIGLKGLMLLGRIK
NNQEGKKLNLVIKNEEYFEFVQNRNN.

[0296] The amino acid sequence of Francisella novicida Cpf1 E1006A/D1255A follows. (D917, A1006, and A1255 are bolded and underlined).

MSIYQEFVNKYSLSKTLRFELIPQGKTLENIKARGLILDDEKRAKDYKK
AKQIIDKYHQFFIEEILSSVCISEDLLQNYSDVYFKLKKSDDDNLQKDF
KSAKDTIKKQISEYIKDSEKFKNLFNQNLIDAKKGQESDLILWLKQSKD
NGIELFKANSDITDIDEALEIIKSFKGWTTYFKGFHENRKNVYSSNDIP
TSIIYRIVDDNLPKFLENKAKYESLKDKAPEAINYEQIKKDLAEELTFD
IDYKTSEVNQRVFSLDEVFEIANFNNYLNQSGITKFNTIIGGKFVNGEN
TKRKGINEYINLYSQQINDKTLKKYKMSVLFKQILSDTESKSFVIDKLE
DDSDVVTTMQSFYEQIAAFKTVEEKSIKETLSLLFDDLKAQKLDLSKIY
FKNDKSLTDLSQQVFDDYSVIGTAVLEYITQQIAPKNLDNPSKKEQELI
AKKTEKAKYLSLETIKLALEEFNKHRDIDKQCRFEEILANFAAIPMIFD
EIAQNKDNLAQISIKYQNQGKKDLLQASAEDDVKAIKDLLDQTNNLLHK
LKIFHISQSEDKANILDKDEHFYLVFEECYFELANIVPLYNKIRNYITQ
KPYSDEKFKLNFENSTLANGWDKNKEPDNTAILFIKDDKYYLGVMNKKN
NKIFDDKAIKENKGEGYKKIVYKLLPGANKMLPKVFFSAKSIKFYNPSE
DILRIRNHSTHTKNGSPQKGYEKFEFNIEDCRKFIDFYKQSISKHPEWK
DFGFRFSDTQRYNSIDEFYREVENQGYKLTFENISESYIDSVVNQGKLY
LFQIYNKDFSAYSKGRPNLHTLYWKALFDERNLQDVVYKLNGEAELFYR
KQSIPKKITHPAKEAIANKNKDNPKKESVFEYDLIKDKRFTEDKFFFHC
PITINFKSSGANKFNDEINLLLKEKANDVHILSIDRGERHLAYYTLVDG
KGNIIKQDTFNIIGNDRMKTNYHDKLAAIEKDRDSARKDWKKINNIKEM
KEGYLSQVVHEIAKLVIEYNAIVVFADLNFGFKRGRFKVEKQVYQKLEK
MLIEKLNYLVFKDNEFDKTGGVLRAYQLTAPFETFKKMGKQTGIIYYVP
AGFTSKICPVTGFVNQLYPKYESVSKSQEFFSKFDKICYNLDKGYFEFS
FDYKNFGDKAAKGKWTIASFGSRLINFRNSDKNHNWDTREVYPTKELEK
LLKDYSIEYGHGECIKAAICGESDKKFFAKLTSVLNTILQMRNSKTGTE
LDYLISPVADVNGNFFDSRQAPKNMPQDAAANGAYHIGLKGLMLLGRIK
NNQEGKKLNLVIKNEEYFEFVQNRNN.

[0297] The amino acid sequence of Francisella novicida Cpf1 D917A/E1006A/D1255A follows. (A917, A1006, and A1255 are bolded and underlined).

MSIYQEFVNKYSLSKTLRFELIPQGKTLENIKARGLILDDEKRAKDYKK
AKQIIDKYHQFFIEEILSSVCISEDLLQNYSDVYFKLKKSDDDNLQKDF
KSAKDTIKKQISEYIKDSEKFKNLFNQNLIDAKKGQESDLILWLKQSKD
NGIELFKANSDITDIDEALEIIKSFKGWTTYFKGFHENRKNVYSSNDIP
TSIIYRIVDDNLPKFLENKAKYESLKDKAPEAINYEQIKKDLAEELTFD
IDYKTSEVNQRVFSLDEVFEIANFNNYLNQSGITKFNTIIGGKFVNGEN
TKRKGINEYINLYSQQINDKTLKKYKMSVLFKQILSDTESKSFVIDKLE
DDSDVVTTMQSFYEQIAAFKTVEEKSIKETLSLLFDDLKAQKLDLSKIY
FKNDKSLTDLSQQVFDDYSVIGTAVLEYITQQIAPKNLDNPSKKEQELI
AKKTEKAKYLSLETIKLALEEFNKHRDIDKQCRFEEILANFAAIPMIFD
EIAQNKDNLAQISIKYQNQGKKDLLQASAEDDVKAIKDLLDQTNNLLHK
LKIFHISQSEDKANILDKDEHFYLVFEECYFELANIVPLYNKIRNYITQ
KPYSDEKFKLNFENSTLANGWDKNKEPDNTAILFIKDDKYYLGVMNKKN
NKIFDDKAIKENKGEGYKKIVYKLLPGANKMLPKVFFSAKSIKFYNPSE
DILRIRNHSTHTKNGSPQKGYEKFEFNIEDCRKFIDFYKQSISKHPEWK
DFGFRFSDTQRYNSIDEFYREVENQGYKLTFENISESYIDSVVNQGKLY
LFQIYNKDFSAYSKGRPNLHTLYWKALFDERNLQDVVYKLNGEAELFYR
KQSIPKKITHPAKEAIANKNKDNPKKESVFEYDLIKDKRFTEDKFFFHC
PITINFKSSGANKFNDEINLLLKEKANDVHILSIARGERHLAYYTLVDG
KGNIIKQDTFNIIGNDRMKTNYHDKLAAIEKDRDSARKDWKKINNIKEM
KEGYLSQVVHEIAKLVIEYNAIVVFADLNFGFKRGRFKVEKQVYQKLEK
MLIEKLNYLVFKDNEFDKTGGVLRAYQLTAPFETFKKMGKQTGIIYYVP
AGFTSKICPVTGFVNQLYPKYESVSKSQEFFSKFDKICYNLDKGYFEFS
FDYKNFGDKAAKGKWTIASFGSRLINFRNSDKNHNWDTREVYPTKELEK
LLKDYSIEYGHGECIKAAICGESDKKFFAKLTSVLNTILQMRNSKTGTE
LDYLISPVADVNGNFFDSRQAPKNMPQDAAANGAYHIGLKGLMLLGRIK
NNQEGKKLNLVIKNEEYFEFVQNRNN.

[0298] In some embodiments, one of the Cas9 domains present in the fusion protein may be replaced with a guide nucleotide sequence-programmable DNA-binding protein domain that has no requirements for a PAM sequence.

[0299] In some embodiments, the Cas domain is a Cas9 domain from Staphylococcus aureus (SaCas9). In some embodiments, the SaCas9 domain is a nuclease active SaCas9, a nuclease inactive SaCas9 (SaCas9d), or a SaCas9 nickase (SaCas9n). In some embodiments, the SaCas9 domain comprises a N579A mutation, or a corresponding mutation in any of the amino acid sequences provided herein.

[0300] In some embodiments, the SaCas9 domain, the SaCas9d domain, or the SaCas9n domain can bind to a nucleic acid sequence having a non-canonical PAM. In some embodiments, the SaCas9 domain, the SaCas9d domain, or the SaCas9n domain can bind to a nucleic acid sequence having a NNGRRT or a NNGRRT PAM sequence. In some embodiments, the SaCas9 domain comprises one or more of a E781X, a N967X, and a R1014X mutation, or a corresponding mutation in any of the amino acid sequences provided herein, wherein X is any amino acid. In some embodiments, the SaCas9 domain comprises one or more of a E781K, a N967K, and a R1014H mutation, or one or more corresponding mutation in any of the amino acid sequences provided herein. In some embodiments, the SaCas9 domain comprises a E781K, a N967K, or a R1014H mutation, or corresponding mutations in any of the amino acid sequences provided herein.

[0301] The amino acid sequence of an exemplary SaCas9 is as follows:

MKRNYILGLDIGITSVGYGIIDYETRDVIDAGVRLFKEANVENNEGRRS
KRGARRLKRRRRHRIQRVKKLLFDYNLLTDHSELSGINPYEARVKGLSQ
KLSEEEFSAALLHLAKRRGVHNVNEVEEDTGNELSTKEQISRNSKALEE
KYVAELQLERLKKDGEVRGSINRFKTSDYVKEAKQLLKVQKAYHQLDQS
FIDTYIDLLETRRTYYEGPGEGSPFGWKDIKEWYEMLMGHCTYFPEELR
SVKYAYNADLYNALNDLNNLVITRDENEKLEYYEKFQIIENVFKQKKKP
TLKQIAKEILVNEEDIKGYRVTSTGKPEFTNLKVYHDIKDITARKEIIE
NAELLDQIAKILTIYQSSEDIQEELTNLNSELTQEEIEQISNLKGYTGT
HNLSLKAINLILDELWHTNDNQIAIFNRLKLVPKKVDLSQQKEIPTTLV
DDFILSPVVKRSFIQSIKVINAIIKKYGLPNDIIIELAREKNSKDAQKM
INEMQKRNRQTNERIEEIIRTTGKENAKYLIEKIKLHDMQEGKCLYSLE
AIPLEDLLNNPFNYEVDHIIPRSVSFDNSFNNKVLVKQEENSKKGNRTP
FQYLSSSDSKISYETFKKHILNLAKGKGRISKTKKEYLLEERDINRFSV
QKDFINRNLVDTRYATRGLMNLLRSYFRVNNLDVKVKSINGGFTSFLRR
KWKFKKERNKGYKHHAEDALIIANADFIFKEWKKLDKAKKVMENQMFEE
KQAESMPEIETEQEYKEIFITPHQIKHIKDFKDYKYSHRVDKKPNRELI
NDTLYSTRKDDKGNTLIVNNLNGLYDKDNDKLKKLINKSPEKLLMYHHD
PQTYQKLKLIMEQYGDEKNPLYKYYEETGNYLTKYSKKDNGPVIKKIKY
YGNKLNAHLDITDDYPNSRNKVVKLSLKPYRFDVYLDNGVYKFVTVKNL
DVIKKENYYEVNSKCYEEAKKLKKISNQAEFIASFYNNDLIKINGELYR
VIGVNNDLLNRIEVNMIDITYREYLENMNDKRPPRIIKTIASKTQSIKK
YSTDILGNLYEVKSKKHPQIIKKG.

In this sequence, residue N579, which is underlined and in bold, may be mutated (e.g., to a A579) to yield a SaCas9 nickase.

[0302] The amino acid sequence of an exemplary SaCas9n is as follows:

KRNYILGLDIGITSVGYGIIDYETRDVIDAGVRLFKEANVENNEGRRSK
RGARRLKRRRRHRIQRVKKLLFDYNLLTDHSELSGINPYEARVKGLSQK
LSEEEFSAALLHLAKRRGVHNVNEVEEDTGNELSTKEQISRNSKALEEK
YVAELQLERLKKDGEVRGSINRFKTSDYVKEAKQLLKVQKAYHQLDQSF
IDTYIDLLETRRTYYEGPGEGSPFGWKDIKEWYEMLMGHCTYFPEELRS
VKYAYNADLYNALNDLNNLVITRDENEKLEYYEKFQIIENVFKQKKKPT
LKQIAKEILVNEEDIKGYRVTSTGKPEFTNLKVYHDIKDITARKEIIEN
AELLDQIAKILTIYQSSEDIQEELTNLNSELTQEEIEQISNLKGYTGTH
NLSLKAINLILDELWHTNDNQIAIFNRLKLVPKKVDLSQQKEIPTTLVD
DFILSPVVKRSFIQSIKVINAIIKKYGLPNDIIIELAREKNSKDAQKMI
NEMQKRNRQTNERIEEIIRTTGKENAKYLIEKIKLHDMQEGKCLYSLEA
IPLEDLLNNPFNYEVDHIIPRSVSFDNSFNNKVLVKQEEASKKGNRTPF
QYLSSSDSKISYETFKKHILNLAKGKGRISKIKKEYLLEERDINRFSVQ
KDFINRNLVDTRYATRGLMNLLRSYFRVNNLDVKVKSINGGFTSFLRRK
WKFKKERNKGYKHHAEDALIIANADFIFKEWKKLDKAKKVMENQMFEEK
QAESMPEIETEQEYKEIFITPHQIKHIKDFKDYKYSHRVDKKPNRELIN
DTLYSTRKDDKGNTLIVNNLNGLYDKDNDKLKKLINKSPEKLLMYHHDP
QTYQKLKLIMEQYGDEKNPLYKYYEETGNYLTKYSKKDNGPVIKKIKYY
GNKLNAHLDITDDYPNSRNKVVKLSLKPYRFDVYLDNGVYKFVTVKNLD
VIKKENYYEVNSKCYEEAKKLKKISNQAEFIASFYNNDLIKINGELYRV
IGVNNDLLNRIEVNMIDITYREYLENMNDKRPPRIIKTIASKTQSIKKY
STDILGNLYEVKSKKHPQIIKKG.

[0303] In this sequence, residue A579, which can be mutated from N579 to yield a SaCas9 nickase, is underlined and in bold.

[0304] The amino acid sequences of an exemplary SaKKH Cas9 is as follows:

KRNYILGLDIGITSVGYGIIDYETRDVIDAGVRLFKEANVENNEGRRSK
RGARRLKRRRRHRIQRVKKLLFDYNLLTDHSELSGINPYEARVKGLSQK
LSEEEFSAALLHLAKRRGVHNVNEVEEDTGNELSTKEQISRNSKALEEK
YVAELQLERLKKDGEVRGSINRFKTSDYVKEAKQLLKVQKAYHQLDQSF
IDTYIDLLETRRTYYEGPGEGSPFGWKDIKEWYEMLMGHCTYFPEELRS
VKYAYNADLYNALNDLNNLVITRDENEKLEYYEKFQIIENVFKQKKKPT
LKQIAKEILVNEEDIKGYRVTSTGKPEFTNLKVYHDIKDITARKEIIEN
AELLDQIAKILTIYQSSEDIQEELTNLNSELTQEEIEQISNLKGYTGTH
NLSLKAINLILDELWHTNDNQIAIFNRLKLVPKKVDLSQQKEIPTTLVD
DFILSPVVKRSFIQSIKVINAIIKKYGLPNDIIIELAREKNSKDAQKMI
NEMQKRNRQTNERIEEIIRTTGKENAKYLIEKIKLHDMQEGKCLYSLEA
IPLEDLLNNPFNYEVDHIIPRSVSFDNSFNNKVLVKQEEASKKGNRTPF
QYLSSSDSKISYETFKKHILNLAKGKGRISKIKKEYLLEERDINRFSVQ
KDFINRNLVDTRYATRGLMNLLRSYFRVNNLDVKVKSINGGFTSFLRRK
WKFKKERNKGYKHHAEDALIIANADFIFKEWKKLDKAKKVMENQMFEEK
QAESMPEIETEQEYKEIFITPHQIKHIKDFKDYKYSHRVDKKPNRKLIN
DTLYSTRKDDKGNTLIVNNLNGLYDKDNDKLKKLINKSPEKLLMYHHDP
QTYQKLKLIMEQYGDEKNPLYKYYEETGNYLTKYSKKDNGPVIKKIKYY
GNKLNAHLDITDDYPNSRNKVVKLSLKPYRFDVYLDNGVYKFVTVKNLD
VIKKENYYEVNSKCYEEAKKLKKISNQAEFIASFYKNDLIKINGELYRV
IGVNNDLLNRIEVNMIDITYREYLENMNDKRPPHIIKTIASKTQSIKKY
STDILGNLYEVKSKKHPQIIKKG.

[0305] Residue A579 above, which can be mutated from N579 to yield a SaCas9 nickase, is underlined and in bold. Residues K781, K967, and H1014 above, which can be mutated from E781, N967, and R1014 to yield a SaKKH Cas9 are underlined and in italics.

### High Fidelity Cas9 Domains

[0306] Some aspects of the disclosure provide high fidelity Cas9 domains. In some embodiments, high fidelity Cas9 domains are engineered Cas9 domains comprising one or more mutations that decrease electrostatic interactions between the Cas9 domain and the sugar-phosphate backbone of a DNA, relative to a corresponding wild-type Cas9 domain. High fidelity Cas9 domains that have decreased electrostatic interactions with the sugar-phosphate backbone of DNA can have less off-target effects. In some embodiments, the Cas9 domain (e.g., a wild type Cas9 domain) comprises one or more mutations that decrease the association between the Cas9 domain and the sugar-phosphate backbone of a DNA. In some embodiments, a Cas9 domain comprises one or more mutations that decreases the association between the Cas9 domain and the sugar-phosphate backbone of DNA by at least 1%, at least 2%, at least 3%, at least 4%, at least 5%, at least 10%, at least 15%, at least 20%, at least 25%, at least 30%, at least 35%, at least 40%, at least 45%, at least 50%, at least 55%, at least 60%, at least 65%, or at least 70%.

[0307] In some embodiments, any of the Cas9 fusion proteins provided herein comprise one or more of a N497X, a R661X, a Q695X, and/or a Q926X mutation, or a corresponding mutation in any of the amino acid sequences provided herein, wherein X is any amino acid. In some embodiments, any of the Cas9 fusion proteins provided herein comprise one or more of a N497A, a R661A, a Q695A, and/or a Q926A mutation, or a corresponding mutation in any of the amino acid sequences provided herein. In some embodiments, the Cas9 domain comprises a D10A mutation, or a corresponding mutation in any of the amino acid sequences provided herein. Cas9 domains with high fidelity are known in the art and would be apparent to the skilled artisan. For example, Cas9 domains with high fidelity have been described in Kleinstiver, B. P., et al. “High-fidelity CRISPR-Cas9 nucleases with no detectable genome-wide off-target effects.” Nature 529, 490-495 (2016); and Slaymaker, I. M., et al. “Rationally engineered Cas9 nucleases with improved specificity.” Science 351, 84-88 (2015); the entire contents of each are incorporated herein by reference.

[0308] In some embodiments, the modified Cas9 is a high fidelity Cas9 enzyme. In some embodiments, the high fidelity Cas9 enzyme is SpCas9 (K855A), eSpCas9(1.1), SpCas9-HF1, or hyper accurate Cas9 variant (HypaCas9). The modified Cas9 eSpCas9(1.1) contains alanine substitutions that weaken the interactions between the HNH/RuvC groove and the non-target DNA strand, preventing strand separation and cutting at off-target sites. Similarly, SpCas9-HF1 lowers off-target editing through alanine substitutions that disrupt Cas9's interactions with the DNA phosphate backbone. HypaCas9 contains mutations (SpCas9 N692A/M694A/Q695A/H698A) in the REC3 domain that increase Cas9 proofreading and target discrimination. All three high fidelity enzymes generate less off-target editing than wildtype Cas9.

[0309] An exemplary high fidelity Cas9 is provided below.

High Fidelity Cas9 domain mutations relative to Cas9 are shown in bold and underline

MDKKYSIGL [symbol] IGTNSVGWAVITDEYKVPSKKFKVLGNTDRHSIKKNLIGA
LLFDSGETAEATRLKRTARRRYTRRKNRICYLQEIFSNEMAKVDDSFFHR
LEESFLVEEDKKHERHPIFGNIVDEVAYHEKYPTIYHLRKKLVDSTDKAD
LRLIYLALAHMIKFRGHFLIEGDLNPDNSDVDKLFIQLVQTYNQLFEENP
INASGVDAKAILSARLSKSRRLENLIAQLPGEKKNGLFGNLIALSLGLTP
NFKSNFDLAEDAKLQLSKDTYDDDLDNLLAQIGDQYADLFLAAKNLSDAI
LLSDILRVNTEITKAPLSASMIKRYDEHHQDLTLLKALVRQQLPEKYKEI
FFDQSKNGYAGYIDGGASQEEFYKFIKPILEKMDGTEELLVKLNREDLLR
KQRTFDNGSIPHQIHLGELHAILRRQEDFYPFLKDNREKIEKILTFRIPY
YVGPLARGNSRFAWMTRKSEETITPWNFEEVVDKGASAQSFIERMT [symbol] FDK
NLPNEKVLPKHSLLYEYFTVYNELTKVKYVTEGMRKPAFLSGEQKKAIVD
LLFKTNRKVTVKQLKEDYFKKIECFDSVEISGVEDRFNASLGTYHDLLKI
IKDKDFLDNEENEDILEDIVLTLTLFEDREMIEERLKTYAHLFDDKVMKQ
LKRRRYTGWG [symbol] LSRKLINGIRDKQSGKTILDFLKSDGFANRNFM [symbol] LIHDD
SLTFKEDIQKAQVSGQGDSLHEHIANLAGSPAIKKGILQTVKVVDELVKV
MGRHKPENIVIEMARENQTTQKGQKNSRERMKRIEEGIKELGSQILKEHP
VENTQLQNEKLYLYYLQNGRDMYVDQELDINRLSDYDVDHIVPQSFLKDD
SIDNKVLTRSDKNRGKSDNVPSEEVVKKMKNYWRQLLNAKLITQRKFDNL
TKAERGGLSELDKAGFIKRQLVETR [symbol] ITKHVAQILDSRMNTKYDENDKLI
REVKVITLKSKLVSDFRKDFQFYKVREINNYHHAHDAYLNAVVGTALIKK
YPKLESEFVYGDYKVYDVRKMIAKSEQEIGKATAKYFFYSNIMNFFKTEI
TLANGEIRKRPLIETNGETGEIVWDKGRDFATVRKVLSMPQVNIVKKTEV
QTGGFSKESILPKRNSDKLIARKKDWDPKKYGGFDSPTVAYSVLVVAKVE
KGKSKKLKSVKELLGITIMERSSFEKNPIDFLEAKGYKEVKKDLIIKLPK
YSLFELENGRKRMLASAGELQKGNELALPSKYVNFLYLASHYEKLKGSPE
DNEQKQLFVEQHKHYLDEIIEQISEFSKRVILADANLDKVLSAYNKHRDK
PIREQAENIIHLFTLTNLGAPAAFKYFDTTIDRKRYTSTKEVLDATLIHQ
SITGLYETRIDLSQLGGD.

### Guide Polynucleotides

[0310] In an embodiment, the guide polynucleotide is a guide RNA. An RNA/Cas complex can assist in “guiding” Cas protein to a target DNA. Cas9/crRNA/tracrRNA endonucleolytically cleaves linear or circular dsDNA target complementary to the spacer. The target strand not complementary to crRNA is first cut endonucleolytically, then trimmed 3′-5′ exonucleolytically. In nature, DNA-binding and cleavage typically requires protein and both RNAs. However, single guide RNAs (“sgRNA”, or simply “gNRA”) can be engineered so as to incorporate aspects of both the crRNA and tracrRNA into a single RNA species. See, e.g., Jinek M. et al., Science 337:816-821(2012), the entire contents of which is hereby incorporated by reference. Cas9 recognizes a short motif in the CRISPR repeat sequences (the PAM or protospacer adjacent motif) to help distinguish self-versus-non self. Cas9 nuclease sequences and structures are well known to those of skill in the art (see e.g., “Complete genome sequence of an M1 strain of Streptococcus pyogenes.” Ferretti, J. J. et al., Natl. Acad. Sci. U.S.A. 98:4658-4663(2001); “CRISPR RNA maturation by trans-encoded small RNA and host factor RNase III.” Deltcheva E. et al., Nature 471:602-607(2011); and “Programmable dual-RNA-guided DNA endonuclease in adaptive bacterial immunity.” Jinek M. et al, Science 337:816-821(2012), the entire contents of each of which are incorporated herein by reference). Cas9 orthologs have been described in various species, including, but not limited to, S. pyogenes and S. thermophilus. Additional suitable Cas9 nucleases and sequences can be apparent to those of skill in the art based on this disclosure, and such Cas9 nucleases and sequences include Cas9 sequences from the organisms and loci disclosed in Chylinski, Rhun, and Charpentier, “The tracrRNA and Cas9 families of type II CRISPR-Cas immunity systems” (2013) RNA Biology 10:5, 726-737; the entire contents of which are incorporated herein by reference. In some embodiments, a Cas9 nuclease has an inactive (e.g., an inactivated) DNA cleavage domain, that is, the Cas9 is a nickase.

[0311] In some embodiments, the guide polynucleotide is at least one single guide RNA (“sgRNA” or “gNRA”). In some embodiments, the guide polynucleotide is at least one tracrRNA. In some embodiments, the guide polynucleotide does not require PAM sequence to guide the polynucleotide-programmable DNA-binding domain (e.g., Cas9 or Cpf1) to the target nucleotide sequence.

[0312] The polynucleotide programmable nucleotide binding domain (e.g., a CRISPR-derived domain) of the base editors disclosed herein can recognize a target polynucleotide sequence by associating with a guide polynucleotide. A guide polynucleotide (e.g., gRNA) is typically single-stranded and can be programmed to site-specifically bind (i.e., via complementary base pairing) to a target sequence of a polynucleotide, thereby directing a base editor that is in conjunction with the guide nucleic acid to the target sequence. A guide polynucleotide can be DNA. A guide polynucleotide can be RNA. In some cases, the guide polynucleotide comprises natural nucleotides (e.g., adenosine). In some cases, the guide polynucleotide comprises non-natural (or unnatural) nucleotides (e.g., peptide nucleic acid or nucleotide analogs). In some cases, the targeting region of a guide nucleic acid sequence can be at least 15, 16, 17, 18, 19, 20, 21, 22, 23, 24, 25, 26, 27, 28, 29, or 30 nucleotides in length. A targeting region of a guide nucleic acid can be between 10-30 nucleotides in length, or between 15-25 nucleotides in length, or between 15-20 nucleotides in length.

[0313] In some embodiments, a guide polynucleotide comprises two or more individual polynucleotides, which can interact with one another via for example complementary base pairing (e.g., a dual guide polynucleotide). For example, a guide polynucleotide can comprise a CRISPR RNA (crRNA) and a trans-activating CRISPR RNA (tracrRNA). For example, a guide polynucleotide can comprise one or more trans-activating CRISPR RNA (tracrRNA).

[0314] In type II CRISPR systems, targeting of a nucleic acid by a CRISPR protein (e.g., Cas9) typically requires complementary base pairing between a first RNA molecule (crRNA) comprising a sequence that recognizes the target sequence and a second RNA molecule (trRNA) comprising repeat sequences which forms a scaffold region that stabilizes the guide RNA-CRISPR protein complex. Such dual guide RNA systems can be employed as a guide polynucleotide to direct the base editors disclosed herein to a target polynucleotide sequence.

[0315] In some embodiments, the base editor provided herein utilizes a single guide polynucleotide (e.g., gRNA). In some embodiments, the base editor provided herein utilizes a dual guide polynucleotide (e.g., dual gRNAs). In some embodiments, the base editor provided herein utilizes one or more guide polynucleotide (e.g., multiple gRNA). In some embodiments, a single guide polynucleotide is utilized for different base editors described herein. For example, a single guide polynucleotide can be utilized for a cytidine base editor and an adenosine base editor.

[0316] In other embodiments, a guide polynucleotide can comprise both the polynucleotide targeting portion of the nucleic acid and the scaffold portion of the nucleic acid in a single molecule (i.e., a single-molecule guide nucleic acid). For example, a single-molecule guide polynucleotide can be a single guide RNA (sgRNA or gRNA). Herein the term guide polynucleotide sequence contemplates any single, dual, or multi-molecule nucleic acid capable of interacting with and directing a base editor to a target polynucleotide sequence.

[0317] Typically, a guide polynucleotide (e.g., crRNA/trRNA complex or a gRNA) comprises a “polynucleotide-targeting segment” that includes a sequence capable of recognizing and binding to a target polynucleotide sequence, and a “protein-binding segment” that stabilizes the guide polynucleotide within a polynucleotide programmable nucleotide binding domain component of a base editor. In some embodiments, the polynucleotide targeting segment of the guide polynucleotide recognizes and binds to a DNA polynucleotide, thereby facilitating the editing of a base in DNA. In other cases, the polynucleotide targeting segment of the guide polynucleotide recognizes and binds to an RNA polynucleotide, thereby facilitating the editing of a base in RNA. Herein a “segment” refers to a section or region of a molecule, e.g., a contiguous stretch of nucleotides in the guide polynucleotide. A segment can also refer to a region/section of a complex such that a segment can comprise regions of more than one molecule. For example, where a guide polynucleotide comprises multiple nucleic acid molecules, the protein-binding segment of can include all or a portion of multiple separate molecules that are for instance hybridized along a region of complementarity. In some embodiments, a protein-binding segment of a DNA-targeting RNA that comprises two separate molecules can comprise (i) base pairs 40-75 of a first RNA molecule that is 100 base pairs in length; and (ii) base pairs 10-25 of a second RNA molecule that is 50 base pairs in length. The definition of “segment,” unless otherwise specifically defined in a particular context, is not limited to a specific number of total base pairs, is not limited to any particular number of base pairs from a given RNA molecule, is not limited to a particular number of separate molecules within a complex, and can include regions of RNA molecules that are of any total length and can include regions with complementarity to other molecules.

[0318] A guide RNA or a guide polynucleotide can comprise two or more RNAs, e.g., CRISPR RNA (crRNA) and transactivating crRNA (tracrRNA). A guide RNA or a guide polynucleotide can sometimes comprise a single-chain RNA, or single guide RNA (sgRNA) formed by fusion of a portion (e.g., a functional portion) of crRNA and tracrRNA. A guide RNA or a guide polynucleotide can also be a dual RNA comprising a crRNA and a tracrRNA. Furthermore, a crRNA can hybridize with a target DNA.

[0319] As discussed above, a guide RNA or a guide polynucleotide can be an expression product. For example, a DNA that encodes a guide RNA can be a vector comprising a sequence coding for the guide RNA. A guide RNA or a guide polynucleotide can be transferred into a cell by transfecting the cell with an isolated guide RNA or plasmid DNA comprising a sequence coding for the guide RNA and a promoter. A guide RNA or a guide polynucleotide can also be transferred into a cell in other way, such as using virus-mediated gene delivery.

[0320] A guide RNA or a guide polynucleotide can be isolated. For example, a guide RNA can be transfected in the form of an isolated RNA into a cell or organism. A guide RNA can be prepared by in vitro transcription using any in vitro transcription system known in the art. A guide RNA can be transferred to a cell in the form of isolated RNA rather than in the form of plasmid comprising encoding sequence for a guide RNA.

[0321] A guide RNA or a guide polynucleotide can comprise three regions: a first region at the 5′ end that can be complementary to a target site in a chromosomal sequence, a second internal region that can form a stem loop structure, and a third 3′ region that can be single-stranded. A first region of each guide RNA can also be different such that each guide RNA guides a fusion protein to a specific target site. Further, second and third regions of each guide RNA can be identical in all guide RNAs.

[0322] A first region of a guide RNA or a guide polynucleotide can be complementary to sequence at a target site in a chromosomal sequence such that the first region of the guide RNA can base pair with the target site. In some cases, a first region of a guide RNA can comprise from or from about 10 nucleotides to 25 nucleotides (i.e., from 10 nucleotides to nucleotides; or from about 10 nucleotides to about 25 nucleotides; or from 10 nucleotides to about 25 nucleotides; or from about 10 nucleotides to 25 nucleotides) or more. For example, a region of base pairing between a first region of a guide RNA and a target site in a chromosomal sequence can be or can be about 10, 11, 12, 13, 14, 15, 16, 17, 18, 19, 20, 22, 23, 24, 25, or more nucleotides in length. Sometimes, a first region of a guide RNA can be or can be about 19, 20, or 21 nucleotides in length.

[0323] A guide RNA or a guide polynucleotide can also comprise a second region that forms a secondary structure. For example, a secondary structure formed by a guide RNA can comprise a stem (or hairpin) and a loop. A length of a loop and a stem can vary. For example, a loop can range from or from about 3 to 10 nucleotides in length, and a stem can range from or from about 6 to 20 base pairs in length. A stem can comprise one or more bulges of 1 to 10 or about 10 nucleotides. The overall length of a second region can range from or from about 16 to 60 nucleotides in length. For example, a loop can be or can be about 4 nucleotides in length and a stem can be or can be about 12 base pairs.

[0324] A guide RNA or a guide polynucleotide can also comprise a third region at the 3′ end that can be essentially single-stranded. For example, a third region is sometimes not complementarity to any chromosomal sequence in a cell of interest and is sometimes not complementarity to the rest of a guide RNA. Further, the length of a third region can vary. A third region can be more than or more than about 4 nucleotides in length. For example, the length of a third region can range from or from about 5 to 60 nucleotides in length.

[0325] A guide RNA or a guide polynucleotide can target any exon or intron of a gene target. In some cases, a guide can target exon 1 or 2 of a gene, in other cases; a guide can target exon 3 or 4 of a gene. A composition can comprise multiple guide RNAs that all target the same exon or in some cases, multiple guide RNAs that can target different exons. An exon and an intron of a gene can be targeted.

[0326] A guide RNA or a guide polynucleotide can target a nucleic acid sequence of or of about 20 nucleotides. A target nucleic acid can be less than or less than about 20 nucleotides. A target nucleic acid can be at least or at least about 5, 10, 15, 16, 17, 18, 19, 20, 21, 22, 23, 24, 25, 30, or anywhere between 1-100 nucleotides in length. A target nucleic acid can be at most or at most about 5, 10, 15, 16, 17, 18, 19, 20, 21, 22, 23, 24, 25, 30, 40, 50, or anywhere between 1-100 nucleotides in length. A target nucleic acid sequence can be or can be about 20 bases immediately 5′ of the first nucleotide of the PAM. A guide RNA can target a nucleic acid sequence. A target nucleic acid can be at least or at least about 1-10, 1-20, 1-30, 1-40, 1-50, 1-60, 1-70, 1-80, 1-90, or 1-100 nucleotides.

[0327] A guide polynucleotide, for example, a guide RNA, can refer to a nucleic acid that can hybridize to another nucleic acid, for example, the target nucleic acid or protospacer in a genome of a cell. A guide polynucleotide can be RNA. A guide polynucleotide can be DNA. The guide polynucleotide can be programmed or designed to bind to a sequence of nucleic acid site-specifically. A guide polynucleotide can comprise a polynucleotide chain and can be called a single guide polynucleotide. A guide polynucleotide can comprise two polynucleotide chains and can be called a double guide polynucleotide. A guide RNA can be introduced into a cell or embryo as an RNA molecule. For example, a RNA molecule can be transcribed in vitro and/or can be chemically synthesized. An RNA can be transcribed from a synthetic DNA molecule, e.g., a gBlocks® gene fragment. A guide RNA can then be introduced into a cell or embryo as an RNA molecule. A guide RNA can also be introduced into a cell or embryo in the form of a non-RNA nucleic acid molecule, e.g., DNA molecule. For example, a DNA encoding a guide RNA can be operably linked to promoter control sequence for expression of the guide RNA in a cell or embryo of interest. A RNA coding sequence can be operably linked to a promoter sequence that is recognized by RNA polymerase III (Pol III). Plasmid vectors that can be used to express guide RNA include, but are not limited to, px330 vectors and px333 vectors. In some cases, a plasmid vector (e.g., px333 vector) can comprise at least two guide RNA-encoding DNA sequences.

[0328] Methods for selecting, designing, and validating guide polynucleotides, e.g., guide RNAs and targeting sequences are described herein and known to those skilled in the art. For example, to minimize the impact of potential substrate promiscuity of a deaminase domain in the nucleobase editor system (e.g., an AID domain), the number of residues that could unintentionally be targeted for deamination (e.g., off-target C residues that could potentially reside on ssDNA within the target nucleic acid locus) may be minimized. In addition, software tools can be used to optimize the gRNAs corresponding to a target nucleic acid sequence, e.g., to minimize total off-target activity across the genome. For example, for each possible targeting domain choice using S. pyogenes Cas9, all off-target sequences (preceding selected PAMs, e.g., NAG or NGG) may be identified across the genome that contain up to certain number (e.g., 1, 2, 3, 4, 5, 6, 7, 8, 9, or 10) of mismatched base-pairs. First regions of gRNAs complementary to a target site can be identified, and all first regions (e.g., crRNAs) can be ranked according to its total predicted off-target score; the top-ranked targeting domains represent those that are likely to have the greatest on-target and the least off-target activity. Candidate targeting gRNAs can be functionally evaluated by using methods known in the art and/or as set forth herein.

[0329] As a non-limiting example, target DNA hybridizing sequences in crRNAs of a guide RNA for use with Cas9s may be identified using a DNA sequence searching algorithm. gRNA design may be carried out using custom gRNA design software based on the public tool cas-offinder as described in Bae S., Park J., & Kim J.-S. Cas-OFFinder: A fast and versatile algorithm that searches for potential off-target sites of Cas9 RNA-guided endonucleases. Bioinformatics 30, 1473-1475 (2014). This software scores guides after calculating their genome-wide off-target propensity. Typically matches ranging from perfect matches to 7 mismatches are considered for guides ranging in length from 17 to 24. Once the off-target sites are computationally-determined, an aggregate score is calculated for each guide and summarized in a tabular output using a web-interface. In addition to identifying potential target sites adjacent to PAM sequences, the software also identifies all PAM adjacent sequences that differ by 1, 2, 3 or more than 3 nucleotides from the selected target sites. Genomic DNA sequences for a target nucleic acid sequence, e.g., a target gene may be obtained and repeat elements may be screened using publicly available tools, for example, the RepeatMasker program. RepeatMasker searches input DNA sequences for repeated elements and regions of low complexity. The output is a detailed annotation of the repeats present in a given query sequence.

[0330] Following identification, first regions of guide RNAs, e.g., crRNAs, may be ranked into tiers based on their distance to the target site, their orthogonality and presence of 5′ nucleotides for close matches with relevant PAM sequences (for example, a 5′ G based on identification of close matches in the human genome containing a relevant PAM e.g., NGG PAM for S. pyogenes, NNGRRT or NNGRRV PAM for S. aureus). As used herein, orthogonality refers to the number of sequences in the human genome that contain a minimum number of mismatches to the target sequence. A “high level of orthogonality” or “good orthogonality” may, for example, refer to 20-mer targeting domains that have no identical sequences in the human genome besides the intended target, nor any sequences that contain one or two mismatches in the target sequence. Targeting domains with good orthogonality may be selected to minimize off-target DNA cleavage.

[0331] In some embodiments, a reporter system may be used for detecting base-editing activity and testing candidate guide polynucleotides. In some embodiments, a reporter system may comprise a reporter gene based assay where base editing activity leads to expression of the reporter gene. For example, a reporter system may include a reporter gene comprising a deactivated start codon, e.g., a mutation on the template strand from 3′-TAC-5′ to 3′-CAC-5′. Upon successful deamination of the target C, the corresponding mRNA will be transcribed as 5′-AUG-3′ instead of 5′-GUG-3′, enabling the translation of the reporter gene. Suitable reporter genes will be apparent to those of skill in the art. Non-limiting examples of reporter genes include gene encoding green fluorescence protein (GFP), red fluorescence protein (RFP), luciferase, secreted alkaline phosphatase (SEAP), or any other gene whose expression are detectable and apparent to those skilled in the art. The reporter system can be used to test many different gRNAs, e.g., in order to determine which residue(s) with respect to the target DNA sequence the respective deaminase will target. sgRNAs that target non-template strand can also be tested in order to assess off-target effects of a specific base editing protein, e.g., a Cas9 deaminase fusion protein. In some embodiments, such gRNAs can be designed such that the mutated start codon will not be base-paired with the gRNA. The guide polynucleotides can comprise standard ribonucleotides, modified ribonucleotides (e.g., pseudouridine), ribonucleotide isomers, and/or ribonucleotide analogs. In some embodiments, the guide polynucleotide can comprise at least one detectable label. The detectable label can be a fluorophore (e.g., FAM, TMR, Cy3, Cy5, Texas Red, Oregon Green, Alexa Fluors, Halo tags, or suitable fluorescent dye), a detection tag (e.g., biotin, digoxigenin, and the like), quantum dots, or gold particles.

[0332] The guide polynucleotides can be synthesized chemically, synthesized enzymatically, or a combination thereof. For example, the guide RNA can be synthesized using standard phosphoramidite-based solid-phase synthesis methods. Alternatively, the guide RNA can be synthesized in vitro by operably linking DNA encoding the guide RNA to a promoter control sequence that is recognized by a phage RNA polymerase. Examples of suitable phage promoter sequences include T7, T3, SP6 promoter sequences, or variations thereof. In embodiments in which the guide RNA comprises two separate molecules (e.g., crRNA and tracrRNA), the crRNA can be chemically synthesized and the tracrRNA can be enzymatically synthesized.

[0333] In some embodiments, a base editor system may comprise multiple guide polynucleotides, e.g., gRNAs. For example, the gRNAs may target to one or more target loci (e.g., at least 1 gRNA, at least 2 gRNA, at least 5 gRNA, at least 10 gRNA, at least 20 gRNA, at least 30 g RNA, at least 50 gRNA) comprised in a base editor system. The multiple gRNA sequences can be tandemly arranged and are preferably separated by a direct repeat.

[0334] A DNA sequence encoding a guide RNA (gRNA) or a guide polynucleotide can also be part of a vector. Further, a vector can comprise additional expression control sequences (e.g., enhancer sequences, Kozak sequences, polyadenylation sequences, transcriptional termination sequences, etc.), selectable marker sequences (e.g., GFP or antibiotic resistance genes such as puromycin), origins of replication, and the like. A DNA molecule encoding a guide RNA can also be linear. A DNA molecule encoding a guide RNA (gRNA) or a guide polynucleotide can also be circular.

[0335] In some embodiments, one or more components of a base editor system may be encoded by DNA sequences. Such DNA sequences may be introduced into an expression system, e.g., a cell, together or separately. For example, DNA sequences encoding a polynucleotide programmable nucleotide binding domain and a guide RNA may be introduced into a cell, each DNA sequence can be part of a separate molecule (e.g., one vector containing the polynucleotide programmable nucleotide binding domain coding sequence and a second vector containing the guide RNA coding sequence) or both can be part of a same molecule (e.g., one vector containing coding (and regulatory) sequence for both the polynucleotide programmable nucleotide binding domain and the guide RNA).

[0336] A guide polynucleotide can comprise one or more modifications to provide a nucleic acid with a new or enhanced feature. A guide polynucleotide can comprise a nucleic acid affinity tag. A guide polynucleotide can comprise synthetic nucleotide, synthetic nucleotide analog, nucleotide derivatives, and/or modified nucleotides.

[0337] In some cases, a gRNA or a guide polynucleotide can comprise modifications. A modification can be made at any location of a gRNA or a guide polynucleotide. More than one modification can be made to a single gRNA or a guide polynucleotide. A gRNA or a guide polynucleotide can undergo quality control after a modification. In some cases, quality control can include PAGE, HPLC, MS, or any combination thereof.

[0338] A modification of a gRNA or a guide polynucleotide can be a substitution, insertion, deletion, chemical modification, physical modification, stabilization, purification, or any combination thereof.

[0339] A gRNA or a guide polynucleotide can also be modified by 5′adenylate, 5′ guanosine-triphosphate cap, 5′N7-Methylguanosine-triphosphate cap, 5′triphosphate cap, 3′phosphate, 3′thiophosphate, 5′phosphate, 5′thiophosphate, Cis-Syn thymidine dimer, trimers, C12 spacer, C3 spacer, C6 spacer, dSpacer, PC spacer, rSpacer, Spacer 18, Spacer 9,3′-3′ modifications, 5′-5′ modifications, abasic, acridine, azobenzene, biotin, biotin BB, biotin TEG, cholesteryl TEG, desthiobiotin TEG, DNP TEG, DNP-X, DOTA, dT-Biotin, dual biotin, PC biotin, psoralen C2, psoralen C6, TINA, 3′DABCYL, black hole quencher 1, black hole quencer 2, DABCYL SE, dT-DABCYL, IRDye QC-1, QSY-21, QSY-35, QSY-7, QSY-9, carboxyl linker, thiol linkers, 2′-deoxyribonucleoside analog purine, 2′-deoxyribonucleoside analog pyrimidine, ribonucleoside analog, 2′-O-methyl ribonucleoside analog, sugar modified analogs, wobble/universal bases, fluorescent dye label, 2′-fluoro RNA, 2′-O-methyl RNA, methylphosphonate, phosphodiester DNA, phosphodiester RNA, phosphothioate DNA, phosphorothioate RNA, UNA, pseudouridine-5′-triphosphate, 5′-methylcytidine-5′-triphosphate, or any combination thereof.

[0340] In some cases, a modification is permanent. In other cases, a modification is transient. In some cases, multiple modifications are made to a gRNA or a guide polynucleotide. A gRNA or a guide polynucleotide modification can alter physiochemical properties of a nucleotide, such as their conformation, polarity, hydrophobicity, chemical reactivity, base-pairing interactions, or any combination thereof.

[0341] The PAM sequence can be any PAM sequence known in the art. Suitable PAM sequences include, but are not limited to, NGG, NGA, NGC, NGN, NGT, NGCG, NGAG, NGAN, NGNG, NGCN, NGCG, NGTN, NNGRRT, NNNRRT, NNGRR(N), TTTV, TYCV, TYCV, TATV, NNNNGATT, NNAGAAW, or NAAAAC. Y is a pyrimidine; N is any nucleotide base; W is A or T.

[0342] A modification can also be a phosphorothioate substitute. In some cases, a natural phosphodiester bond can be susceptible to rapid degradation by cellular nucleases and; a modification of internucleotide linkage using phosphorothioate (PS) bond substitutes can be more stable towards hydrolysis by cellular degradation. A modification can increase stability in a gRNA or a guide polynucleotide. A modification can also enhance biological activity. In some cases, a phosphorothioate enhanced RNA gRNA can inhibit RNase A, RNase T1, calf serum nucleases, or any combinations thereof. These properties can allow the use of PS-RNA gRNAs to be used in applications where exposure to nucleases is of high probability in vivo or in vitro. For example, phosphorothioate (PS) bonds can be introduced between the last 3-5 nucleotides at the 5′- or ″-end of a gRNA which can inhibit exonuclease degradation. In some cases, phosphorothioate bonds can be added throughout an entire gRNA to reduce attack by endonucleases.

### Protospacer Adjacent Motif

[0343] The term “protospacer adjacent motif (PAM)” or PAM-like motif refers to a 2-6 base pair DNA sequence immediately following the DNA sequence targeted by the Cas9 nuclease in the CRISPR bacterial adaptive immune system. In some embodiments, the PAM can be a 5′ PAM (i.e., located upstream of the 5′ end of the protospacer). In other embodiments, the PAM can be a 3′ PAM (i.e., located downstream of the 5′ end of the protospacer).

[0344] The PAM sequence is essential for target binding, but the exact sequence depends on a type of Cas protein.

[0345] A base editor provided herein can comprise a CRISPR protein-derived domain that is capable of binding a nucleotide sequence that contains a canonical or non-canonical protospacer adjacent motif (PAM) sequence. A PAM site is a nucleotide sequence in proximity to a target polynucleotide sequence. Some aspects of the disclosure provide for base editors comprising all or a portion of CRISPR proteins that have different PAM specificities. For example, typically Cas9 proteins, such as Cas9 from S. pyogenes (spCas9), require a canonical NGG PAM sequence to bind a particular nucleic acid region, where the “N” in “NGG” is adenine (A), thymine (T), guanine (G), or cytosine (C), and the G is guanine. A PAM can be CRISPR protein-specific and can be different between different base editors comprising different CRISPR protein-derived domains. A PAM can be 5′ or 3′ of a target sequence. A PAM can be upstream or downstream of a target sequence. A PAM can be 1, 2, 3, 4, 5, 6, 7, 8, 9, 10 or more nucleotides in length. Often, a PAM is between 2-6 nucleotides in length. Several PAM variants are described in Table 1 below.

TABLE 1
Cas9 proteins and corresponding PAM sequences

| Variant | PAM |
|---|---|
| spCas9 | NGG |
| spCas9-VRQR | NGA |
| spCas9-VRER | NGCG |
| spCas9-MQKFRAER | NGC |
| xCas9 (sp) | NGN |
| saCas9 | NNGRRT |
| saCas9-KKH | NNNRRT |
| spCas9-MQKSER | NGCG |
| spCas9-MQKSER | NGCN |
| spCas9-LRKIQK | NGTN |
| spCas9-LRVSQK | NGTN |
| spCas9-LRVSQL | NGTN |
| SpyMacCas9 | NAA |
| Cpf1 | 5′ (TTTV) |

[0346] In some embodiments, the PAM is NGC. In some embodiments, the NGC PAM is recognized by a Cas9 variant. In some embodiments, the NGC PAM variant includes one or more amino acid substitutions selected from D1135M, S1136Q, G1218K, E1219F, A1322R, D1332A, R1335E, and T1337R (collectively termed “MQKFRAER”).

[0347] In some embodiments, the PAM is NGT. In some embodiments, the NGT PAM is recognized by a Cas9 variant. In some embodiments, the NGT PAM variant is generated through targeted mutations at one or more residues 1335, 1337, 1135, 1136, 1218, and/or 1219. In some embodiments, the NGT PAM variant is created through targeted mutations at one or more residues 1219, 1335, 1337, 1218. In some embodiments, the NGT PAM variant is created through targeted mutations at one or more residues 1135, 1136, 1218, 1219, and 1335. In some embodiments, the NGT PAM variant is selected from the set of targeted mutations provided in Tables 2 and 3 below.

TABLE 2
NGT PAM Variant Mutations at residues 1219, 1335,
1337, 1218

| Variant | E1219V | R1335Q | T1337 | G1218 |
|---|---|---|---|---|
| 1 | F | V | T | |
| 2 | F | V | R | |
| 3 | F | V | Q | |
| 4 | F | V | L | |
| 5 | F | V | T | R |
| 6 | F | V | R | R |
| 7 | F | V | Q | R |
| 8 | F | V | L | R |
| 9 | L | L | T | |
| 10 | L | L | R | |
| 11 | L | L | Q | |
| 12 | L | L | L | |
| 13 | F | I | T | |
| 14 | F | I | R | |
| 15 | F | I | Q | |
| 16 | F | I | L | |
| 17 | F | G | C | |
| 18 | H | L | N | |
| 19 | F | G | C | A |
| 20 | H | L | N | V |
| 21 | L | A | W | |
| 22 | L | A | F | |
| 23 | L | A | Y | |
| 24 | I | A | W | |
| 25 | I | A | F | |
| 26 | I | A | Y | |

TABLE 3
NGT PAM Variant Mutations at residues 1135, 1136,
1218, 1219, and 1335

| Variant | D1135L | S1136R | G1218S | E1219V | R1335Q |
|---|---|---|---|---|---|
| 27 | G | | | | |
| 28 | V | | | | |
| 29 | I | | | | |
| 30 | | A | | | |
| 31 | | W | | | |
| 32 | | H | | | |
| 33 | | K | | | |
| 34 | | | K | | |
| 35 | | | R | | |
| 36 | | | Q | | |
| 37 | | | T | | |
| 38 | | | N | | |
| 39 | | | | I | |
| 40 | | | | A | |
| 41 | | | | N | |
| 42 | | | | Q | |
| 43 | | | | G | |
| 44 | | | | L | |
| 45 | | | | S | |
| 46 | | | | T | |
| 47 | | | | | L |
| 48 | | | | | I |
| 49 | | | | | V |
| 50 | | | | | N |
| 51 | | | | | S |
| 52 | | | | | T |
| 53 | | | | | F |
| 54 | | | | | Y |
| 55 | N1286Q | I1331F | | | |

[0348] In some embodiments, the NGT PAM variant is selected from variant 5, 7, 28, 31, or 36 in Tables 2 and 3. In some embodiments, the variants have improved NGT PAM recognition.

[0349] In some embodiments, the NGT PAM variants have mutations at residues 1219, 1335, 1337, and/or 1218. In some embodiments, the NGT PAM variant is selected with mutations for improved recognition from the variants provided in Table 4 below.

TABLE 4
NGT PAM Variant Mutations at residues 1219, 1335,
1337, and 1218

| Variant | E1219V | R1335Q | T1337 | G1218 |
|---|---|---|---|---|
| 1 | F | V | T | |
| 2 | F | V | R | |
| 3 | F | V | Q | |
| 4 | F | V | L | |
| 5 | F | V | T | R |
| 6 | F | V | R | R |
| 7 | F | V | Q | R |
| 8 | F | V | L | R |

[0350] In some embodiments, the NGT PAM is selected from the variants provided in Table 5 below.

TABLE 5
NGT PAM variants

| | NGTN | | | | | | | |
|---|---|---|---|---|---|---|---|---|
| | variant | D1135 | S1136 | G1218 | E1219 | A1322R | R1335 | T1337 |
| Variant 1 | LRKIQK | L | R | K | I | — | Q | K |
| Variant 2 | LRSVQK | L | R | S | V | — | Q | K |
| Variant 3 | LRSVQL | L | R | S | V | — | Q | L |
| Variant 4 | LRKIRQK | L | R | K | I | R | Q | K |
| Variant 5 | LRSVRQK | L | R | S | V | R | Q | K |
| Variant 6 | LRSVRQL | L | R | S | V | R | Q | L |

[0351] In some embodiments the NGTN variant is variant 1. In some embodiments, the NGTN variant is variant 2. In some embodiments, the NGTN variant is variant 3. In some embodiments, the NGTN variant is variant 4. In some embodiments, the NGTN variant is variant 5. In some embodiments, the NGTN variant is variant 6.

[0352] In some embodiments, the Cas9 domain is a Cas9 domain from Streptococcus pyogenes (SpCas9). In some embodiments, the SpCas9 domain is a nuclease active SpCas9, a nuclease inactive SpCas9 (SpCas9d), or a SpCas9 nickase (SpCas9n). In some embodiments, the SpCas9 comprises a D9X mutation, or a corresponding mutation in any of the amino acid sequences provided herein, wherein X is any amino acid except for D. In some embodiments, the SpCas9 comprises a D9A mutation, or a corresponding mutation in any of the amino acid sequences provided herein. In some embodiments, the SpCas9 domain, the SpCas9d domain, or the SpCas9n domain can bind to a nucleic acid sequence having a non-canonical PAM. In some embodiments, the SpCas9 domain, the SpCas9d domain, or the SpCas9n domain can bind to a nucleic acid sequence having an NGG, a NGA, or a NGCG PAM sequence.

[0353] In some embodiments, the SpCas9 domain comprises one or more of a D1135X, a R1335X, and a T1337X mutation, or a corresponding mutation in any of the amino acid sequences provided herein, wherein X is any amino acid. In some embodiments, the SpCas9 domain comprises one or more of a D1135E, R1335Q, and T1337R mutation, or a corresponding mutation in any of the amino acid sequences provided herein. In some embodiments, the SpCas9 domain comprises a D1135E, a R1335Q, and a T1337R mutation, or corresponding mutations in any of the amino acid sequences provided herein. In some embodiments, the SpCas9 domain comprises one or more of a D1135X, a R1335X, and a T1337X mutation, or a corresponding mutation in any of the amino acid sequences provided herein, wherein X is any amino acid. In some embodiments, the SpCas9 domain comprises one or more of a D1135V, a R1335Q, and a T1337R mutation, or a corresponding mutation in any of the amino acid sequences provided herein. In some embodiments, the SpCas9 domain comprises a D1135V, a R1335Q, and a T1337R mutation, or corresponding mutations in any of the amino acid sequences provided herein. In some embodiments, the SpCas9 domain comprises one or more of a D1135X, a G1218X, a R1335X, and a T1337X mutation, or a corresponding mutation in any of the amino acid sequences provided herein, wherein X is any amino acid. In some embodiments, the SpCas9 domain comprises one or more of a D1135V, a G1218R, a R1335Q, and a T1337R mutation, or a corresponding mutation in any of the amino acid sequences provided herein. In some embodiments, the SpCas9 domain comprises a D1135V, a G1218R, a R1335Q, and a T1337R mutation, or corresponding mutations in any of the amino acid sequences provided herein.

[0354] In some embodiments, the Cas9 domains of any of the fusion proteins provided herein comprises an amino acid sequence that is at least 60%, at least 65%, at least 70%, at least 75%, at least 80%, at least 85%, at least 90%, at least 95%, at least 96%, at least 97%, at least 98%, at least 99%, or at least 99.5% identical to a Cas9 polypeptide described herein. In some embodiments, the Cas9 domains of any of the fusion proteins provided herein comprises the amino acid sequence of any Cas9 polypeptide described herein. In some embodiments, the Cas9 domains of any of the fusion proteins provided herein consists of the amino acid sequence of any Cas9 polypeptide described herein.

[0355] In some examples, a PAM recognized by a CRISPR protein-derived domain of a base editor disclosed herein can be provided to a cell on a separate oligonucleotide to an insert (e.g., an AAV insert) encoding the base editor. In such embodiments, providing PAM on a separate oligonucleotide can allow cleavage of a target sequence that otherwise would not be able to be cleaved, because no adjacent PAM is present on the same polynucleotide as the target sequence.

[0356] In an embodiment, S. pyogenes Cas9 (SpCas9) can be used as a CRISPR endonuclease for genome engineering. However, others can be used. In some embodiments, a different endonuclease can be used to target certain genomic targets. In some embodiments, synthetic SpCas9-derived variants with non-NGG PAM sequences can be used. Additionally, other Cas9 orthologues from various species have been identified and these “non-SpCas9s” can bind a variety of PAM sequences that can also be useful for the present disclosure. For example, the relatively large size of SpCas9 (approximately 4 kb coding sequence) can lead to plasmids carrying the SpCas9 cDNA that cannot be efficiently expressed in a cell. Conversely, the coding sequence for Staphylococcus aureus Cas9 (SaCas9) is approximately 1 kilobase shorter than SpCas9, possibly allowing it to be efficiently expressed in a cell. Similar to SpCas9, the SaCas9 endonuclease is capable of modifying target genes in mammalian cells in vitro and in mice in vivo. In some embodiments, a Cas protein can target a different PAM sequence. In some embodiments, a target gene can be adjacent to a Cas9 PAM, 5′-NGG, for example. In other embodiments, other Cas9 orthologs can have different PAM requirements. For example, other PAMs such as those of S. thermophilus (5′-NNAGAA for CRISPR1 and 5′-NGGNG for CRISPR3) and Neisseria meningiditis (5′-NNNNGATT) can also be found adjacent to a target gene.

[0357] In some embodiments, for a S. pyogenes system, a target gene sequence can precede (i.e., be 5′ to) a 5′-NGG PAM, and a 20-nt guide RNA sequence can base pair with an opposite strand to mediate a Cas9 cleavage adjacent to a PAM. In some embodiments, an adjacent cut can be or can be about 3 base pairs upstream of a PAM. In some embodiments, an adjacent cut can be or can be about 10 base pairs upstream of a PAM. In some embodiments, an adjacent cut can be or can be about 0-20 base pairs upstream of a PAM. For example, an adjacent cut can be next to, 1, 2, 3, 4, 5, 6, 7, 8, 9, 10, 11, 12, 13, 14, 15, 16, 17, 18, 19, 20, 21, 22, 23, 24, 25, 26, 27, 28, 29, or 30 base pairs upstream of a PAM. An adjacent cut can also be downstream of a PAM by 1 to 30 base pairs. The sequences of exemplary SpCas9 proteins capable of binding a PAM sequence follow:

[0358] The amino acid sequence of an exemplary PAM-binding SpCas9 is as follows:

[sequence omitted]

[0359] The amino acid sequence of an exemplary PAM-binding SpCas9n is as follows:

MDKKYSIGLAIGTNSVGWAVITDEYKVPSKKFKVLGNTDRHSIKKNLIGA
LLFDSGETAEATRLKRTARRRYTRRKNRICYLQEIFSNEMAKVDDSFFHR
LEESFLVEEDKKHERHPIFGNIVDEVAYHEKYPTIYHLRKKLVDSTDKAD
LRLIYLALAHMIKFRGHFLIEGDLNPDNSDVDKLFIQLVQTYNQLFEENP
INASGVDAKAILSARLSKSRRLENLIAQLPGEKKNGLFGNLIALSLGLTP
NFKSNFDLAEDAKLQLSKDTYDDDLDNLLAQIGDQYADLFLAAKNLSDAI
LLSDILRVNTEITKAPLSASMIKRYDEHHQDLTLLKALVRQQLPEKYKEI
FFDQSKNGYAGYIDGGASQEEFYKFIKPILEKMDGTEELLVKLNREDLLR
KQRTFDNGSIPHQIHLGELHAILRRQEDFYPFLKDNREKIEKILTFRIPY
YVGPLARGNSRFAWMTRKSEETITPWNFEEVVDKGASAQSFIERMTNFDK
NLPNEKVLPKHSLLYEYFTVYNELTKVKYVTEGMRKPAFLSGEQKKAIVD
LLFKTNRKVTVKQLKEDYFKKIECFDSVEISGVEDRFNASLGTYHDLLKI
IKDKDFLDNEENEDILEDIVLTLTLFEDREMIEERLKTYAHLFDDKVMKQ
LKRRRYTGWGRLSRKLINGIRDKQSGKTILDFLKSDGFANRNFMQLIHDD
SLTFKEDIQKAQVSGQGDSLHEHIANLAGSPAIKKGILQTVKVVDELVKV
MGRHKPENIVIEMARENQTTQKGQKNSRERMKRIEEGIKELGSQILKEHP
VENTQLQNEKLYLYYLQNGRDMYVDQELDINRLSDYDVDHIVPQSFLKDD
SIDNKVLTRSDKNRGKSDNVPSEEVVKKMKNYWRQLLNAKLITQRKFDNL
TKAERGGLSELDKAGFIKRQLVETRQITKHVAQILDSRMNTKYDENDKLI
REVKVITLKSKLVSDFRKDFQFYKVREINNYHHAHDAYLNAVVGTALIKK
YPKLESEFVYGDYKVYDVRKMIAKSEQEIGKATAKYFFYSNIMNFFKTEI
TLANGEIRKRPLIETNGETGEIVWDKGRDFATVRKVLSMPQVNIVKKTEV
QTGGFSKESILPKRNSDKLIARKKDWDPKKYGGFDSPTVAYSVLVVAKVE
KGKSKKLKSVKELLGITIMERSSFEKNPIDFLEAKGYKEVKKDLIIKLPK
YSLFELENGRKRMLASAGELQKGNELALPSKYVNFLYLASHYEKLKGSPE
DNEQKQLFVEQHKHYLDEIIEQISEFSKRVILADANLDKVLSAYNKHRDK
PIREQAENIIHLFTLTNLGAPAAFKYFDTTIDRKRYTSTKEVLDATLIHQ
SITGLYETRIDLSQLGGD.

[0360] The amino acid sequence of an exemplary PAM-binding SpEQR Cas9 is as follows:

MDKKYSIGLAIGTNSVGWAVITDEYKVPSKKFKVLGNTDRHSIKKNLIGA
LLFDSGETAEATRLKRTARRRYTRRKNRICYLQEIFSNEMAKVDDSFFHR
LEESFVEEDKKHERHPIFGNIVDEVAYHEKYPTIYHLRKKLVDSTDKADL
RLIYLALAHMIKFRGHFLIEGDLNPDNSDVDKLFIQLVQTYNQLFEENPI
NASGVDAKAILSARLSKSRRLENLIAQLPGEKKNGLFGNLIALSLGLTPN
FKSNFDLAEDAKLQLSKDTYDDDLDNLLAQIGDQYADLFLAAKNLSDAIL
LSDILRVNTEITKAPLSASMIKRYDEHHQDLTLLKALVRQQLPEKYKEIF
FDQSKNGYAGYIDGGASQEEFYKFIKPILEKMDGTEELLVKLNREDLLRK
QRTFDNGSIPHQIHLGELHAILRRQEDFYPFLKDNREKIEKILTFRIPYY
VGPLARGNSRFAWMTRKSEETITPWNFEEVVDKGASAQSFIERMTNFDKN
LPNEKVLPKHSLLYEYFTVYNELTKVKYVTEGMRKPAFLSGEQKKAIVDL
LFKTNRKVTVKQLKEDYFKKIECFDSVEISGVEDRFNASLGTYHDLLKII
KDKDFLDNEENEDILEDIVLTLTLFEDREMIEERLKTYAHLFDDKVMKQL
KRRRYTGWGRLSRKLINGIRDKQSGKTILDFLKSDGFANRNFMQLIHDDS
LTFKEDIQKAQVSGQGDSLHEHIANLAGSPAIKKGILQTVKVVDELVKVM
GRHKPENIVIEMARENQTTQKGQKNSRERMKRIEEGIKELGSQILKEHPV
ENTQLQNEKLYLYYLQNGRDMYVDQELDINRLSDYDVDHIVPQSFLKDDS
IDNKVLTRSDKNRGKSDNVPSEEVVKKMKNYWRQLLNAKLITQRKFDNLT
KAERGGLSELDKAGFIKRQLVETRQITKHVAQILDSRMNTKYDENDKLIR
EVKVITLKSKLVSDFRKDFQFYKVREINNYHHAHDAYLNAVVGTALIKKY
PKLESEFVYGDYKVYDVRKMIAKSEQEIGKATAKYFFYSNIMNFFKTEIT
LANGEIRKRPLIETNGETGEIVWDKGRDFATVRKVLSMPQVNIVKKTEVQ
TGGFSKESILPKRNSDKLIARKKDWDPKKYGGF [symbol] SPTVAYSVLVVAKVEK
GKSKKLKSVKELLGITIMERSSFEKNPIDFLEAKGYKEVKKDLIIKLPKY
SLFELENGRKRMLASAGELQKGNELALPSKYVNFLYLASHYEKLKGSPED
NEQKQLFVEQHKHYLDEIIEQISEFSKRVILADANLDKVLSAYNKHRDKP
IREQAENIIHLFTLTNLGAPAAFKYFDTTIDRK [symbol] Y [symbol] STKEVLDATLIHQS
ITGLYETRIDLSQL

GGD. In this sequence, residues E1135, Q1335 and R1337, which can be mutated from D1135, R1335, and T1337 to yield a SpEQR Cas9, are underlined and in bold.

[0361] The amino acid sequence of an exemplary PAM-binding SpVQR Cas9 is as follows:

MDKKYSIGLAIGTNSVGWAVITDEYKVPSKKFKVLGNTDRHSIKKNLIGA
LLFDSGETAEATRLKRTARRRYTRRKNRICYLQEIFSNEMAKVDDSFFHR
LEESFLVEEDKKHERHPIFGNIVDEVAYHEKYPTIYHLRKKLVDSTDKAD
LRLIYLALAHMIKFRGHFLIEGDLNPDNSDVDKLFIQLVQTYNQLFEENP
INASGVDAKAILSARLSKSRRLENLIAQLPGEKKNGLFGNLIALSLGLTP
NFKSNFDLAEDAKLQLSKDTYDDDLDNLLAQIGDQYADLFLAAKNLSDAI
LLSDILRVNTEITKAPLSASMIKRYDEHHQDLTLLKALVRQQLPEKYKEI
FFDQSKNGYAGYIDGGASQEEFYKFIKPILEKMDGTEELLVKLNREDLLR
KQRTFDNGSIPHQIHLGELHAILRRQEDFYPFLKDNREKIEKILTFRIPY
YVGPLARGNSRFAWMTRKSEETITPWNFEEVVDKGASAQSFIERMTNFDK
NLPNEKVLPKHSLLYEYFTVYNELTKVKYVTEGMRKPAFLSGEQKKAIVD
LLFKTNRKVTVKQLKEDYFKKIECFDSVEISGVEDRFNASLGTYHDLLKI
IKDKDFLDNEENEDILEDIVLTLTLFEDREMIEERLKTYAHLFDDKVMKQ
LKRRRYTGWGRLSRKLINGIRDKQSGKTILDFLKSDGFANRNFMQLIHDD
SLTFKEDIQKAQVSGQGDSLHEHIANLAGSPAIKKGILQTVKVVDELVKV
MGRHKPENIVIEMARENQTTQKGQKNSRERMKRIEEGIKELGSQILKEHP
VENTQLQNEKLYLYYLQNGRDMYVDQELDINRLSDYDVDHIVPQSFLKDD
SIDNKVLTRSDKNRGKSDNVPSEEVVKKMKNYWRQLLNAKLITQRKFDNL
TKAERGGLSELDKAGFIKRQLVETRQITKHVAQILDSRMNTKYDENDKLI
REVKVITLKSKLVSDFRKDFQFYKVREINNYHHAHDAYLNAVVGTALIKK
YPKLESEFVYGDYKVYDVRKMIAKSEQEIGKATAKYFFYSNIMNFFKTEI
TLANGEIRKRPLIETNGETGEIVWDKGRDFATVRKVLSMPQVNIVKKTEV
QTGGFSKESILPKRNSDKLIARKKDWDPKKYGGF [symbol] SPTVAYSVLVVAKVE
KGKSKKLKSVKELLGITIMERSSFEKNPIDFLEAKGYKEVKKDLIIKLPK
YSLFELENGRKRMLASAGELQKGNELALPSKYVNFLYLASHYEKLKGSPE
DNEQKQLFVEQHKHYLDEIIEQISEFSKRVILADANLDKVLSAYNKHRDK
PIREQAENIIHLFTLTNLGAPAAFKYFDTTIDRK [symbol] Y [symbol] STKEVLDATLIHQ
SITGLYETRIDLSQ

LGGD. In this sequence, residues V1135, Q1335, and R1337, which can be mutated from D1135, R1335, and T1337 to yield a SpVQR Cas9, are underlined and in bold.

[0362] The amino acid sequence of an exemplary PAM-binding SpVRER Cas9 is as follows:

MDKKYSIGLAIGTNSVGWAVITDEYKVPSKKFKVLGNTDRHSIKKNLIGA
LLFDSGETAEATRLKRTARRRYTRRKNRICYLQEIFSNEMAKVDDSFFHR
LEESFLVEEDKKHERHPIFGNIVDEVAYHEKYPTIYHLRKKLVDSTDKAD
LRLIYLALAHMIKFRGHFLIEGDLNPDNSDVDKLFIQLVQTYNQLFEENP
INASGVDAKAILSARLSKSRRLENLIAQLPGEKKNGLFGNLIALSLGLTP
NFKSNFDLAEDAKLQLSKDTYDDDLDNLLAQIGDQYADLFLAAKNLSDAI
LLSDILRVNTEITKAPLSASMIKRYDEHHQDLTLLKALVRQQLPEKYKEI
FFDQSKNGYAGYIDGGASQEEFYKFIKPILEKMDGTEELLVKLNREDLLR
KQRTFDNGSIPHQIHLGELHAILRRQEDFYPFLKDNREKIEKILTFRIPY
YVGPLARGNSRFAWMTRKSEETITPWNFEEVVDKGASAQSFIERMTNFDK
NLPNEKVLPKHSLLYEYFTVYNELTKVKYVTEGMRKPAFLSGEQKKAIVD
LLFKTNRKVTVKQLKEDYFKKIECFDSVEISGVEDRFNASLGTYHDLLKI
IKDKDFLDNEENEDILEDIVLTLTLFEDREMIEERLKTYAHLFDDKVMKQ
LKRRRYTGWGRLSRKLINGIRDKQSGKTILDFLKSDGFANRNFMQLIHDD
SLTFKEDIQKAQVSGQGDSLHEHIANLAGSPAIKKGILQTVKVVDELVKV
MGRHKPENIVIEMARENQTTQKGQKNSRERMKRIEEGIKELGSQILKEHP
VENTQLQNEKLYLYYLQNGRDMYVDQELDINRLSDYDVDHIVPQSFLKDD
SIDNKVLTRSDKNRGKSDNVPSEEVVKKMKNYWRQLLNAKLITQRKFDNL
TKAERGGLSELDKAGFIKRQLVETRQITKHVAQILDSRMNTKYDENDKLI
REVKVITLKSKLVSDFRKDFQFYKVREINNYHHAHDAYLNAVVGTALIKK
YPKLESEFVYGDYKVYDVRKMIAKSEQEIGKATAKYFFYSNIMNFFKTEI
TLANGEIRKRPLIETNGETGEIVWDKGRDFATVRKVLSMPQVNIVKKTEV
QTGGFSKESILPKRNSDKLIARKKDWDPKKYGGF [symbol] SPTVAYSVLVVAKVE
KGKSKKLKSVKELLGITIMERSSFEKNPIDFLEAKGYKEVKKDLIIKLPK
YSLFELENGRKRMLASA [symbol] ELQKGNELALPSKYVNFLYLASHYEKLKGSPE
DNEQKQLFVEQHKHYLDEIIEQISEFSKRVILADANLDKVLSAYNKHRDK
PIREQAENIIHLFTLTNLGAPAAFKYFDTTIDRK [symbol] Y [symbol] STKEVLDATLIHQ
SITGLYETRIDLSQLGGD.

In the above sequence, residues V1135, R1218, Q1335, and R1337, which can be mutated from D1134, G1217, R1335, and T1337 to yield a SpVRER Cas9, are underlined and in bold.

[0363] In some embodiments, the Cas9 domain is a recombinant Cas9 domain. In some embodiments, the recombinant Cas9 domain is a SpyMacCas9 domain. In some embodiments, the SpyMacCas9 domain is a nuclease active SpyMacCas9, a nuclease inactive SpyMacCas9 (SpyMacCas9d), or a SpyMacCas9 nickase (SpyMacCas9n). In some embodiments, the SaCas9 domain, the SaCas9d domain, or the SaCas9n domain can bind to a nucleic acid sequence having a non-canonical PAM. In some embodiments, the SpyMacCas9 domain, the SpCas9d domain, or the SpCas9n domain can bind to a nucleic acid sequence having a NAA PAM sequence.

Exemplary SpyMacCas9
MDKKYSIGLDIGTNSVGWAVITDDYKVPSKKFKVLGNTDRHSIKKNLIGA
LLFGSGETAEATRLKRTARRRYTRRKNRICYLQEIFSNEMAKVDDSFFHR
LEESFLVEEDKKHERHPIFGNIVDEVAYHEKYPTIYHLRKKLADSTDKAD
LRLIYLALAHMIKFRGHFLIEGDLNPDNSDVDKLFIQLVQIYNQLFEENP
INASRVDAKAILSARLSKSRRLENLIAQLPGEKRNGLFGNLIALSLGLTP
NFKSNFDLAEDAKLQLSKDTYDDDLDNLLAQIGDQYADLFLAAKNLSDAI
LLSDILRVNSEITKAPLSASMIKRYDEHHQDLTLLKALVRQQLPEKYKEI
FFDQSKNGYAGYIDGGASQEEFYKFIKPILEKMDGTEELLVKLNREDLLR
KQRTFDNGSIPHQIHLGELHAILRRQEDFYPFLKDNREKIEKILTFRIPY
YVGPLARGNSRFAWMTRKSEETITPWNFEEVVDKGASAQSFIERMTNFDK
NLPNEKVLPKHSLLYEYFTVYNELTKVKYVTEGMRKPAFLSGEQKKAIVD
LLFKTNRKVTVKQLKEDYFKKIECFDSVEISGVEDRFNASLGAYHDLLKI
IKDKDFLDNEENEDILEDIVLTLTLFEDRGMIEERLKTYAHLFDDKVMKQ
LKRRRYTGWGRLSRKLINGIRDKQSGKTILDFLKSDGFANRNFMQLIHDD
SLTFKEDIQKAQVSGQGHSLHEQIANLAGSPAIKKGILQTVKIVDELVKV
MGHKPENIVIEMARENQTTQKGQKNSRERMKRIEEGIKELGSQILKEHPV
ENTQLQNEKLYLYYLQNGRDMYVDQELDINRLSDYDVDHIVPQSFIKDDS
IDNKVLTRSDKNRGKSDNVPSEEVVKKMKNYWRQLLNAKLITQRKFDNLT
KAERGGLSELDKAGFIKRQLVETRQITKHVAQILDSRMNTKYDENDKLIR
EVKVITLKSKLVSDFRKDFQFYKVREINNYHHAHDAYLNAVVGTALIKKY
PKLESEFVYGDYKVYDVRKMIAKSEQEIGKATAKYFFYSNIMNFFKTEIT
LANGEIRKRPLIETNGETGEIVWDKGRDFATVRKVLSMPQVNIVKKTEIQ
TVGQNGGLFDDNPKSPLEVITSKLVPLKKELNPKKYGGYQKPITAYPVLL
ITDTKQLIPISVMNKKQFEQNPVKFLRDRGYQQVGKNDFIKLPKYTLVDI
GDGIKRLWASSKEIHKGNQLVVSKKSQILLYHAHHLDSDLSNDYLQNHNQ
QFDVLFNEIISFSKKCKLGKEHIQKIENVYSNKKNSASIEELAESFIKLL
GFTQLGATSPFNFLGVKLNQKQYKGKKDYILPCTEGTLIRQSITGLYETR
VDLSKIGED.

[0364] In some cases, a variant Cas9 protein harbors, H840A, P475A, W476A, N477A, D1125A, W1126A, and D1218A mutations such that the polypeptide has a reduced ability to cleave a target DNA or RNA. Such a Cas9 protein has a reduced ability to cleave a target DNA (e.g., a single stranded target DNA) but retains the ability to bind a target DNA (e.g., a single stranded target DNA). As another non-limiting example, in some cases, the variant Cas9 protein harbors D10A, H840A, P475A, W476A, N477A, D1125A, W1126A, and D1218A mutations such that the polypeptide has a reduced ability to cleave a target DNA. Such a Cas9 protein has a reduced ability to cleave a target DNA (e.g., a single stranded target DNA) but retains the ability to bind a target DNA (e.g., a single stranded target DNA). In some cases, when a variant Cas9 protein harbors W476A and W1126A mutations or when the variant Cas9 protein harbors P475A, W476A, N477A, D1125A, W1126A, and D1218A mutations, the variant Cas9 protein does not bind efficiently to a PAM sequence. Thus, in some such cases, when such a variant Cas9 protein is used in a method of binding, the method does not require a PAM sequence. In other words, in some cases, when such a variant Cas9 protein is used in a method of binding, the method can include a guide RNA, but the method can be performed in the absence of a PAM sequence (and the specificity of binding is therefore provided by the targeting segment of the guide RNA). Other residues can be mutated to achieve the above effects (i.e., inactivate one or the other nuclease portions). As non-limiting examples, residues D10, G12, G17, E762, H840, N854, N863, H982, H983, A984, D986, and/or A987 can be altered (i.e., substituted). Also, mutations other than alanine substitutions are suitable.

[0365] In some embodiments, a CRISPR protein-derived domain of a base editor can comprise all or a portion of a Cas9 protein with a canonical PAM sequence (NGG). In other embodiments, a Cas9-derived domain of a base editor can employ a non-canonical PAM sequence. Such sequences have been described in the art and would be apparent to the skilled artisan. For example, Cas9 domains that bind non-canonical PAM sequences have been described in Kleinstiver, B. P., et al., “Engineered CRISPR-Cas9 nucleases with altered PAM specificities” Nature 523, 481-485 (2015); and Kleinstiver, B. P., et al., “Broadening the targeting range of Staphylococcus aureus CRISPR-Cas9 by modifying PAM recognition” Nature Biotechnology 33, 1293-1298 (2015); the entire contents of each are hereby incorporated by reference.

Cas9 Domains with Reduced Exclusivity

[0366] Typically, Cas9 proteins, such as Cas9 from S. pyogenes (spCas9), require a canonical NGG PAM sequence to bind a particular nucleic acid region, where the “N” in “NGG” is adenosine (A), thymidine (T), or cytosine (C), and the G is guanosine. This may limit the ability to edit desired bases within a genome. In some embodiments, the base editing fusion proteins provided herein may need to be placed at a precise location, for example a region comprising a target base that is upstream of the PAM. See e.g., Komor, A. C., et al., “Programmable editing of a target base in genomic DNA without double-stranded DNA cleavage” Nature 533, 420-424 (2016), the entire contents of which are hereby incorporated by reference. Accordingly, in some embodiments, any of the fusion proteins provided herein may contain a Cas9 domain that is capable of binding a nucleotide sequence that does not contain a canonical (e.g., NGG) PAM sequence. Cas9 domains that bind to non-canonical PAM sequences have been described in the art and would be apparent to the skilled artisan. For example, Cas9 domains that bind non-canonical PAM sequences have been described in Kleinstiver, B. P., et al., “Engineered CRISPR-Cas9 nucleases with altered PAM specificities” Nature 523, 481-485 (2015); and Kleinstiver, B. P., et al., “Broadening the targeting range of Staphylococcus aureus CRISPR-Cas9 by modifying PAM recognition” Nature Biotechnology 33, 1293-1298 (2015); Nishimasu, H., et al., “Engineered CRISPR-Cas9 nuclease with expanded targeting space” Science. 2018 Sep. 21; 361(6408):1259-1262, Chatterjee, P., et al., Minimal PAM specificity of a highly similar SpCas9 ortholog” Sci Adv. 2018 Oct. 24; 4(10):eaau0766. doi: 10.1126/sciadv.aau0766, the entire contents of each are hereby incorporated by reference.

Fusion Proteins Comprising a Cas9 Domain and a Cytidine Deaminase and/or Adenosine Deaminase

[0367] Some aspects of the disclosure provide fusion proteins comprising a Cas9 domain or other nucleic acid programmable DNA binding protein and one or more adenosine deaminase domain, cytidine deaminase domain, and/or DNA glycosylase domains. It should be appreciated that the Cas9 domain may be any of the Cas9 domains or Cas9 proteins (e.g., dCas9 or nCas9) provided herein. In some embodiments, any of the Cas9 domains or Cas9 proteins (e.g., dCas9 or nCas9) provided herein may be fused with any of the cytidine deaminases and adenosine deaminases provided herein. The domains of the base editors disclosed herein can be arranged in any order.

[0368] For example, and without limitation, in some embodiments, the fusion protein comprises the structure:

NH₂-[cytidine deaminase]-[Cas9 domain]-[adenosine deaminase]-COOH;
NH₂-[adenosine deaminase]-[Cas9 domain]-[cytidine deaminase]-COOH;
NH₂-[adenosine deaminase]-[cytidine deaminase]-[Cas9 domain]-COOH;
NH₂-[cytidine deaminase]-[adenosine deaminase]-[Cas9 domain]-COOH;
NH₂-[Cas9 domain]-[adenosine deaminase]-[cytidine deaminase]-COOH; or
NH₂-[Cas9 domain]-[cytidine deaminase]-[adenosine deaminase]-COOH.

[0369] In some embodiments, the adenosine deaminase of the fusion protein comprises a TadA*8 and a cytidine deaminase. In some embodiments, the TadA*8 is TadA*8.1, TadA*8.2, TadA*8.3, TadA*8.4, TadA*8.5, TadA*8.6, TadA*8.7, TadA*8.8, TadA*8.9, TadA*8.10, TadA*8.11, TadA*8.12, TadA*8.13, TadA*8.14, TadA*8.15, TadA*8.16, TadA*8.17, TadA*8.18, TadA*8.19, TadA*8.20, TadA*8.21, TadA*8.22, TadA*8.23, or TadA*8.24.

[0370] Exemplary fusion protein structures include the following:

NH₂-[adenosine deaminase]-[Cas9]-[cytidine deaminase]-COOH;
NH₂-[cytidine deaminase]-[Cas9]-[adenosine deaminase]-COOH;
NH₂-[TadA*8]-[Cas9]-[cytidine deaminase]-COOH; or
NH₂-[cytidine deaminase]-[Cas9]-[TadA*8]-COOH.

[0371] In some embodiments, the fusion proteins comprising a cytidine deaminase, abasic editor, and adenosine deaminase and a napDNAbp (e.g., Cas9 domain) do not include a linker sequence. In some embodiments, a linker is present between the cytidine deaminase and adenosine deaminase domains and the napDNAbp. In some embodiments, the “-” used in the general architecture above indicates the presence of an optional linker. In some embodiments, the cytidine deaminase and adenosine deaminase and the napDNAbp are fused via any of the linkers provided herein. For example, in some embodiments the cytidine deaminase and adenosine deaminase and the napDNAbp are fused via any of the linkers provided below in the section entitled “Linkers”.

[0372] In some embodiments, the general architecture of exemplary Cas9 or Cas12 fusion proteins with a cytidine deaminase, adenosine deaminase and a Cas9 or Cas12 domain comprises any one of the following structures, where NLS is a nuclear localization sequence (e.g., any NLS provided herein), NH₂ is the N-terminus of the fusion protein, and COOH is the C-terminus of the fusion protein.

[0373] NH₂-NLS-[cytidine deaminase]-[Cas9 domain]-[adenosine deaminase]-COOH;

[0374] NH₂-NLS-[adenosine deaminase]-[Cas9 domain]-[cytidine deaminase]-COOH;

[0375] NH₂-NLS-[adenosine deaminase] [cytidine deaminase]-[Cas9 domain]-COOH;

[0376] NH₂-NLS-[cytidine deaminase]-[adenosine deaminase]-[Cas9 domain]-COOH;

[0377] NH₂-NLS-[Cas9 domain]-[adenosine deaminase]-[cytidine deaminase]-COOH;

[0378] NH₂-NLS-[Cas9 domain]-[cytidine deaminase]-[adenosine deaminase]-COOH;

[0379] NH₂-[cytidine deaminase]-[Cas9 domain]-[adenosine deaminase]-NLS—COOH;

[0380] NH₂-[adenosine deaminase]-[Cas9 domain]-[cytidine deaminase]-NL2-COOH;

[0381] NH₂-[adenosine deaminase] [cytidine deaminase]-[Cas9 domain]-NLS—COOH;

[0382] NH₂-[cytidine deaminase]-[adenosine deaminase]-[Cas9 domain]-NLS—COOH;

[0383] NH₂-[Cas9 domain]-[adenosine deaminase]-[cytidine deaminase]-NLS—COOH; or

[0384] NH₂-[Cas9 domain]-[cytidine deaminase]-[adenosine deaminase]-NLS—COOH.

[0385] In some embodiments, the NLS is present in a linker or the NLS is flanked by linkers, for example described herein. In some embodiments, the N-terminus or C-terminus NLS is a bipartite NLS. A bipartite NLS comprises two basic amino acid clusters, which are separated by a relatively short spacer sequence (hence bipartite—2 parts, while monopartite NLSs are not). The NLS of nucleoplasmin, KR[PAATKKAGQA]KKKK, is the prototype of the ubiquitous bipartite signal: two clusters of basic amino acids, separated by a spacer of about 10 amino acids. The sequence of an exemplary bipartite NLS follows: PKKKRKVEGADKRTADGSEFESPKKKRKV.

[0386] In some embodiments, the fusion proteins comprising a cytidine deaminase, adenosine deaminase, a Cas9 domain and an NLS do not comprise a linker sequence. In some embodiments, linker sequences between one or more of the domains or proteins (e.g., cytidine deaminase, adenosine deaminase, Cas9 domain or NLS) are present.

[0387] It should be appreciated that the fusion proteins of the present disclosure may comprise one or more additional features. For example, in some embodiments, the fusion protein may comprise inhibitors, cytoplasmic localization sequences, export sequences, such as nuclear export sequences, or other localization sequences, as well as sequence tags that are useful for solubilization, purification, or detection of the fusion proteins. Suitable protein tags provided herein include, but are not limited to, biotin carboxylase carrier protein (BCCP) tags, myc-tags, calmodulin-tags, FLAG-tags, hemagglutinin (HA)-tags, polyhistidine tags, also referred to as histidine tags or His-tags, maltose binding protein (MBP)-tags, nus-tags, glutathione-S-transferase (GST)-tags, green fluorescent protein (GFP)-tags, thioredoxin-tags, S-tags, Softags (e.g., Softag 1, Softag 3), strep-tags, biotin ligase tags, FlAsH tags, V5 tags, and SBP-tags. Additional suitable sequences will be apparent to those of skill in the art. In some embodiments, the fusion protein comprises one or more His tags.

[0388] Exemplary, yet nonlimiting, fusion proteins are described in International PCT Application Nos. PCT/2017/044935 and PCT/US2020/016288, each of which is incorporated herein by reference for its entirety.

### Fusion Proteins Comprising a Nuclear Localization Sequence (NLS)

[0389] In some embodiments, the fusion proteins provided herein further comprise one or more (e.g., 2, 3, 4, 5) nuclear targeting sequences, for example a nuclear localization sequence (NLS). In one embodiment, a bipartite NLS is used. In some embodiments, a NLS comprises an amino acid sequence that facilitates the importation of a protein, that comprises an NLS, into the cell nucleus (e.g., by nuclear transport). In some embodiments, any of the fusion proteins provided herein further comprise a nuclear localization sequence (NLS). In some embodiments, the NLS is fused to the N-terminus of the fusion protein. In some embodiments, the NLS is fused to the C-terminus of the fusion protein. In some embodiments, the NLS is fused to the N-terminus of the Cas9 domain. In some embodiments, the NLS is fused to the C-terminus of an nCas9 domain or a dCas9 domain. In some embodiments, the NLS is fused to the N-terminus of the deaminase. In some embodiments, the NLS is fused to the C-terminus of the deaminase. In some embodiments, the NLS is fused to the fusion protein via one or more linkers. In some embodiments, the NLS is fused to the fusion protein without a linker. In some embodiments, the NLS comprises an amino acid sequence of any one of the NLS sequences provided or referenced herein. Additional nuclear localization sequences are known in the art and would be apparent to the skilled artisan. For example, NLS sequences are described in Plank et al., PCT/EP2000/011690, the contents of which are incorporated herein by reference for their disclosure of exemplary nuclear localization sequences. In some embodiments, an NLS comprises the amino acid sequence PKKKRKVEGADKRTADGSE FESPKKKRKV, KRTADGSEFESPKKKRKV, KRPAATKKAGQAKKKK, KKTELQTTNAENKTKKL, KRGINDRNFWRGENGRKTR, RKSGKIAAIVVKRPRKPKKKRKV, or MDSLLMNRRKFLYQFKNVRWAKGRRETYLC.

[0390] In some embodiments, the NLS is present in a linker or the NLS is flanked by linkers, for example, the linkers described herein. In some embodiments, the N-terminus or C-terminus NLS is a bipartite NLS. A bipartite NLS comprises two basic amino acid clusters, which are separated by a relatively short spacer sequence (hence bipartite—2 parts, while monopartite NLSs are not). The NLS of nucleoplasmin, KR[PAATKKAGQA]KKKK, is the prototype of the ubiquitous bipartite signal: two clusters of basic amino acids, separated by a spacer of about 10 amino acids. The sequence of an exemplary bipartite NLS follows:

PKKKRKVEGADKRTADGSEFESPKKKRKV

[0391] In some embodiments, the fusion proteins do not comprise a linker sequence. In some embodiments, linker sequences between one or more of the domains or proteins are present. In some embodiments, the general architecture of exemplary Cas9 fusion proteins with an adenosine deaminase or a cytidine deaminase and a Cas9 domain comprises any one of the following structures, where NLS is a nuclear localization sequence (e.g., any NLS provided herein), NH₂ is the N-terminus of the fusion protein, and COOH is the C-terminus of the fusion protein:

[0392] NH₂-NLS-[adenosine deaminase]-[Cas9 domain]-COOH;

[0393] NH₂-NLS [Cas9 domain]-[adenosine deaminase]-COOH;

[0394] NH₂-[adenosine deaminase]-[Cas9 domain]-NLS—COOH;

[0395] NH₂-[Cas9 domain]-[adenosine deaminase]-NLS—COOH;

[0396] NH₂-NLS-[cytidine deaminase]-[Cas9 domain]-COOH;

[0397] NH₂-NLS [Cas9 domain]-[cytidine deaminase]-COOH;

[0398] NH₂-[cytidine deaminase]-[Cas9 domain]-NLS—COOH; or

[0399] NH₂-[Cas9 domain]-[cytidine deaminase]-NLS—COOH.

[0400] It should be appreciated that the fusion proteins of the present disclosure may comprise one or more additional features. For example, in some embodiments, the fusion protein may comprise inhibitors, cytoplasmic localization sequences, export sequences, such as nuclear export sequences, or other localization sequences, as well as sequence tags that are useful for solubilization, purification, or detection of the fusion proteins. Suitable protein tags provided herein include, but are not limited to, biotin carboxylase carrier protein (BCCP) tags, myc-tags, calmodulin-tags, FLAG-tags, hemagglutinin (HA)-tags, polyhistidine tags, also referred to as histidine tags or His-tags, maltose binding protein (MBP)-tags, nus-tags, glutathione-S-transferase (GST)-tags, green fluorescent protein (GFP)-tags, thioredoxin-tags, S-tags, Softags (e.g., Softag 1, Softag 3), strep-tags, biotin ligase tags, FlAsH tags, V5 tags, and SBP-tags. Additional suitable sequences will be apparent to those of skill in the art. In some embodiments, the fusion protein comprises one or more His tags.

[0401] A vector that encodes a CRISPR enzyme comprising one or more nuclear localization sequences (NLSs) can be used. For example, there can be or be about 1, 2, 3, 4, 5, 6, 7, 8, 9, 10 NLSs used. A CRISPR enzyme can comprise the NLSs at or near the ammo-terminus, about or more than about 1, 2, 3, 4, 5, 6, 7, 8, 9, 10 NLSs at or near the carboxy-terminus, or any combination of these (e.g., one or more NLS at the ammo-terminus and one or more NLS at the carboxy terminus). When more than one NLS is present, each can be selected independently of others, such that a single NLS can be present in more than one copy and/or in combination with one or more other NLSs present in one or more copies.

[0402] CRISPR enzymes used in the methods can comprise about 6 NLSs. An NLS is considered near the N- or C-terminus when the nearest amino acid to the NLS is within about 50 amino acids along a polypeptide chain from the N- or C-terminus, e.g., within 1, 2, 3, 4, 5, 10, 15, 20, 25, 30, 40, or 50 amino acids.

Fusion Proteins with Internal Insertions

[0403] Provided herein are fusion proteins comprising a heterologous polypeptide fused to a nucleic acid programmable nucleic acid binding protein, for example, a napDNAbp. A heterologous polypeptide can be a polypeptide that is not found in the native or wild-type napDNAbp polypeptide sequence. The heterologous polypeptide can be fused to the napDNAbp at a C-terminal end of the napDNAbp, an N-terminal end of the napDNAbp, or inserted at an internal location of the napDNAbp. In some embodiments, the heterologous polypeptide is inserted at an internal location of the napDNAbp.

[0404] In some embodiments, the heterologous polypeptide is a deaminase or a functional fragment thereof. For example, a fusion protein can comprise a deaminase flanked by an N-terminal fragment and a C-terminal fragment of a Cas9 or Cas12 (e.g., Cas12b/C2c1), polypeptide. The deaminase in a fusion protein can be an adenosine deaminase. In some embodiments, the adenosine deaminase is a TadA (e.g., TadA7.10 or TadA*8). In some embodiments, the TadA is a TadA*8. TadA sequences (e.g., TadA7.10 or TadA*8) as described herein are suitable deaminases for the above-described fusion proteins.

[0405] The deaminase can be a circular permutant deaminase. For example, the deaminase can be a circular permutant adenosine deaminase. In some embodiments, the deaminase is a circular permutant TadA, circularly permutated at amino acid residue 116 as numbered in the TadA reference sequence. In some embodiments, the deaminase is a circular permutant TadA, circularly permutated at amino acid residue 136 as numbered in the TadA reference sequence. In some embodiments, the deaminase is a circular permutant TadA, circularly permutated at amino acid residue 65 as numbered in the TadA reference sequence.

[0406] The fusion protein can comprise more than one deaminase. The fusion protein can comprise, for example, 1, 2, 3, 4, 5 or more deaminases. In some embodiments, the fusion protein comprises one deaminase. In some embodiments, the fusion protein comprises two deaminases. The two or more deaminases in a fusion protein can be an adenosine deaminase. cytidine deaminase, or a combination thereof. The two or more deaminases can be homodimers. The two or more deaminases can be heterodimers. The two or more deaminases can be inserted in tandem in the napDNAbp. In some embodiments, the two or more deaminases may not be in tandem in the napDNAbp.

[0407] In some embodiments, the napDNAbp in the fusion protein is a Cas9 polypeptide or a fragment thereof. The Cas9 polypeptide can be a variant Cas9 polypeptide. In some embodiments, the Cas9 polypeptide is a Cas9 nickase (nCas9) polypeptide or a fragment thereof. In some embodiments, the Cas9 polypeptide is a nuclease dead Cas9 (dCas9) polypeptide or a fragment thereof. The Cas9 polypeptide in a fusion protein can be a full-length Cas9 polypeptide. In some cases, the Cas9 polypeptide in a fusion protein may not be a full length Cas9 polypeptide. The Cas9 polypeptide can be truncated, for example, at a N-terminal or C-terminal end relative to a naturally-occurring Cas9 protein. The Cas9 polypeptide can be a circularly permuted Cas9 protein. The Cas9 polypeptide can be a fragment, a portion, or a domain of a Cas9 polypeptide, that is still capable of binding the target polynucleotide and a guide nucleic acid sequence.

[0408] In some embodiments, the Cas9 polypeptide is a Streptococcus pyogenes Cas9 (SpCas9), Staphylococcus aureus Cas9 (SaCas9), Streptococcus thermophilus I Cas9 (St1Cas9), or fragments or variants thereof.

[0409] The Cas9 polypeptide of a fusion protein can comprise an amino acid sequence that is at least 85%, at least 90%, at least 91%, at least 92%, at least 93%, at least 94%, at least 95%, at least 96%, at least 97%, at least 98%, at least 99%, or at least 99.5% identical to a naturally-occurring Cas9 polypeptide.

[0410] The Cas9 polypeptide of a fusion protein can comprise an amino acid sequence that is at least 85%, at least 90%, at least 91%, at least 92%, at least 93%, at least 94%, at least 95%, at least 96%, at least 97%, at least 98%, at least 99%, or at least 99.5% identical to the Cas9 amino acid sequence set forth below (called the “Cas9 reference sequence” below):

[sequence omitted]
(single underline: HNH domain; double underline:
RuvC domain).

[0411] Fusion proteins comprising a heterologous catalytic domain flanked by N- and C-terminal fragments of a Cas9 polypeptide are also useful for base editing in the methods as described herein. Fusion proteins comprising Cas9 and one or more deaminase domains, e.g., adenosine deaminase, or comprising an adenosine deaminase domain flanked by Cas9 sequences are also useful for highly specific and efficient base editing of target sequences. In an embodiment, a chimeric Cas9 fusion protein contains a heterologous catalytic domain (e.g., adenosine deaminase, cytidine deaminase, or adenosine deaminase and cytidine deaminase) inserted within a Cas9 polypeptide. In some embodiments, the fusion protein comprises an adenosine deaminase domain and a cytidine deaminase domain inserted within a Cas9. In some embodiments, an adenosine deaminase is fused within a Cas9 and a cytidine deaminase is fused to the C-terminus. In some embodiments, an adenosine deaminase is fused within Cas9 and a cytidine deaminase fused to the N-terminus. In some embodiments, a cytidine deaminase is fused within Cas9 and an adenosine deaminase is fused to the C-terminus. In some embodiments, a cytidine deaminase is fused within Cas9 and an adenosine deaminase fused to the N-terminus.

[0412] Exemplary structures of a fusion protein with an adenosine deaminase and a cytidine deaminase and a Cas9 are provided as follows:

[0413] NH₂-[Cas9(adenosine deaminase)]-[cytidine deaminase]-COOH;

[0414] NH₂-[cytidine deaminase]-[Cas9(adenosine deaminase)]-COOH;

[0415] NH₂-[Cas9(cytidine deaminase)]-[adenosine deaminase]-COOH; or

[0416] NH₂-[adenosine deaminase]-[Cas9(cytidine deaminase)]-COOH.

In some embodiments, the “-” used in the general architecture above indicates the presence of an optional linker.

[0417] In various embodiments, the catalytic domain has DNA modifying activity (e.g., deaminase activity), such as adenosine deaminase activity. In some embodiments, the adenosine deaminase is a TadA (e.g., TadA7.10). In some embodiments, the TadA is a TadA*8. In some embodiments, a TadA*8 is fused within Cas9 and a cytidine deaminase is fused to the C-terminus. In some embodiments, a TadA*8 is fused within Cas9 and a cytidine deaminase fused to the N-terminus. In some embodiments, a cytidine deaminase is fused within Cas9 and a TadA*8 is fused to the C-terminus. In some embodiments, a cytidine deaminase is fused within Cas9 and a TadA*8 fused to the N-terminus. Exemplary structures of a fusion protein with a TadA*8 and a cytidine deaminase and a Cas9 are provided as follows:

[0418] NH₂-[Cas9(TadA*8)]-[cytidine deaminase]-COOH;

[0419] NH₂-[cytidine deaminase]-[Cas9(TadA*8)]-COOH;

[0420] NH₂-[Cas9(cytidine deaminase)]-[TadA*8]-COOH; or

[0421] NH₂-[TadA*8]-[Cas9(cytidine deaminase)]-COOH.

In some embodiments, the “-” used in the general architecture above indicates the presence of an optional linker.

[0422] The heterologous polypeptide (e.g., deaminase) can be inserted in the napDNAbp (e.g., Cas9 or Cas12 (e.g., Cas12b/C2c1)) at a suitable location, for example, such that the napDNAbp retains its ability to bind the target polynucleotide and a guide nucleic acid. A deaminase (e.g., adenosine deaminase, cytidine deaminase, or adenosine deaminase and cytidine deaminase) can be inserted into a napDNAbp without compromising function of the deaminase (e.g., base editing activity) or the napDNAbp (e.g., ability to bind to target nucleic acid and guide nucleic acid). A deaminase (e.g., adenosine deaminase, cytidine deaminase, or adenosine deaminase and cytidine deaminase) can be inserted in the napDNAbp at, for example, a disordered region or a region comprising a high temperature factor or B-factor as shown by crystallographic studies. Regions of a protein that are less ordered, disordered, or unstructured, for example solvent exposed regions and loops, can be used for insertion without compromising structure or function. A deaminase (e.g., adenosine deaminase, cytidine deaminase, or adenosine deaminase and cytidine deaminase) can be inserted in the napDNAbp in a flexible loop region or a solvent-exposed region. In some embodiments, the deaminase (e.g., adenosine deaminase, cytidine deaminase, or adenosine deaminase and cytidine deaminase) is inserted in a flexible loop of the Cas9 or the Cas12b/C2c1 polypeptide.

[0423] In some embodiments, the insertion location of a deaminase (e.g., adenosine deaminase, cytidine deaminase, or adenosine deaminase and cytidine deaminase) is determined by B-factor analysis of the crystal structure of Cas9 polypeptide. In some embodiments, the deaminase (e.g., adenosine deaminase, cytidine deaminase, or adenosine deaminase and cytidine deaminase) is inserted in regions of the Cas9 polypeptide comprising higher than average B-factors (e.g., higher B factors compared to the total protein or the protein domain comprising the disordered region). B-factor or temperature factor can indicate the fluctuation of atoms from their average position (for example, as a result of temperature-dependent atomic vibrations or static disorder in a crystal lattice). A high B-factor (e.g., higher than average B-factor) for backbone atoms can be indicative of a region with relatively high local mobility. Such a region can be used for inserting a deaminase without compromising structure or function. A deaminase (e.g., adenosine deaminase, cytidine deaminase, or adenosine deaminase and cytidine deaminase) can be inserted at a location with a residue having a Ca atom with a B-factor that is 50%, 60%, 70%, 80%, 90%, 100%, 110%, 120%, 130%, 140%, 150%, 160%, 170%, 180%, 190%, 200%, or greater than 200% more than the average B-factor for the total protein. A deaminase (e.g., adenosine deaminase, cytidine deaminase, or adenosine deaminase and cytidine deaminase) can be inserted at a location with a residue having a Ca atom with a B-factor that is 50%, 60%, 70%, 80%, 90%, 100%, 110%, 120%, 130%, 140%, 150%, 160%, 170%, 180%, 190%, 200% or greater than 200% more than the average B-factor for a Cas9 protein domain comprising the residue. Cas9 polypeptide positions comprising a higher than average B-factor can include, for example, residues 768, 792, 1052, 1015, 1022, 1026, 1029, 1067, 1040, 1054, 1068, 1246, 1247, and 1248 as numbered in the above Cas9 reference sequence. Cas9 polypeptide regions comprising a higher than average B-factor can include, for example, residues 792-872, 792-906, and 2-791 as numbered in the above Cas9 reference sequence.

[0424] A heterologous polypeptide (e.g., deaminase) can be inserted in the napDNAbp at an amino acid residue selected from the group consisting of: 768, 791, 792, 1015, 1016, 1022, 1023, 1026, 1029, 1040, 1052, 1054, 1067, 1068, 1069, 1246, 1247, and 1248 as numbered in the above Cas9 reference sequence, or a corresponding amino acid residue in another Cas9 polypeptide. In some embodiments, the heterologous polypeptide is inserted between amino acid positions 768-769, 791-792, 792-793, 1015-1016, 1022-1023, 1026-1027, 1029-1030, 1040-1041, 1052-1053, 1054-1055, 1067-1068, 1068-1069, 1247-1248, or 1248-1249 as numbered in the above Cas9 reference sequence or corresponding amino acid positions thereof. In some embodiments, the heterologous polypeptide is inserted between amino acid positions 769-770, 792-793, 793-794, 1016-1017, 1023-1024, 1027-1028, 1030-1031, 1041-1042, 1053-1054, 1055-1056, 1068-1069, 1069-1070, 1248-1249, or 1249-1250 as numbered in the above Cas9 reference sequence or corresponding amino acid positions thereof. In some embodiments, the heterologous polypeptide replaces an amino acid residue selected from the group consisting of: 768, 791, 792, 1015, 1016, 1022, 1023, 1026, 1029, 1040, 1052, 1054, 1067, 1068, 1069, 1246, 1247, and 1248 as numbered in the above Cas9 reference sequence, or a corresponding amino acid residue in another Cas9 polypeptide. It should be understood that the reference to the above Cas9 reference sequence with respect to insertion positions is for illustrative purposes. The insertions as discussed herein are not limited to the Cas9 polypeptide sequence of the above Cas9 reference sequence, but include insertion at corresponding locations in variant Cas9 polypeptides, for example a Cas9 nickase (nCas9), nuclease dead Cas9 (dCas9), a Cas9 variant lacking a nuclease domain, a truncated Cas9, or a Cas9 domain lacking partial or complete HNH domain.

[0425] A heterologous polypeptide (e.g., deaminase) can be inserted in the napDNAbp at an amino acid residue selected from the group consisting of: 768, 792, 1022, 1026, 1040, 1068, and 1247 as numbered in the above Cas9 reference sequence, or a corresponding amino acid residue in another Cas9 polypeptide. In some embodiments, the heterologous polypeptide is inserted between amino acid positions 768-769, 792-793, 1022-1023, 1026-1027, 1029-1030, 1040-1041, 1068-1069, or 1247-1248 as numbered in the above Cas9 reference sequence or corresponding amino acid positions thereof. In some embodiments, the heterologous polypeptide is inserted between amino acid positions 769-770, 793-794, 1023-1024, 1027-1028, 1030-1031, 1041-1042, 1069-1070, or 1248-1249 as numbered in the above Cas9 reference sequence or corresponding amino acid positions thereof. In some embodiments, the heterologous polypeptide replaces an amino acid residue selected from the group consisting of: 768, 792, 1022, 1026, 1040, 1068, and 1247 as numbered in the above Cas9 reference sequence, or a corresponding amino acid residue in another Cas9 polypeptide.

[0426] A heterologous polypeptide (e.g., deaminase) can be inserted in the napDNAbp at an amino acid residue as described herein, or a corresponding amino acid residue in another Cas9 polypeptide. In an embodiment, a heterologous polypeptide (e.g., deaminase) can be inserted in the napDNAbp at an amino acid residue selected from the group consisting of: 1002, 1003, 1025, 1052-1056, 1242-1247, 1061-1077, 943-947, 686-691, 569-578, 530-539, and 1060-1077 as numbered in the above Cas9 reference sequence, or a corresponding amino acid residue in another Cas9 polypeptide. The deaminase (e.g., adenosine deaminase, cytidine deaminase, or adenosine deaminase and cytidine deaminase) can be inserted at the N-terminus or the C-terminus of the residue or replace the residue. In some embodiments, the deaminase (e.g., adenosine deaminase, cytidine deaminase, or adenosine deaminase and cytidine deaminase) is inserted at the C-terminus of the residue.

[0427] In some embodiments, an adenosine deaminase (e.g., TadA) is inserted at an amino acid residue selected from the group consisting of: 1015, 1022, 1029, 1040, 1068, 1247, 1054, 1026, 768, 1067, 1248, 1052, and 1246 as numbered in the above Cas9 reference sequence, or a corresponding amino acid residue in another Cas9 polypeptide. In some embodiments, an adenosine deaminase (e.g., TadA) is inserted in place of residues 792-872, 792-906, or 2-791 as numbered in the above Cas9 reference sequence, or a corresponding amino acid residue in another Cas9 polypeptide. In some embodiments, the adenosine deaminase is inserted at the N-terminus of an amino acid selected from the group consisting of: 1015, 1022, 1029, 1040, 1068, 1247, 1054, 1026, 768, 1067, 1248, 1052, and 1246 as numbered in the above Cas9 reference sequence, or a corresponding amino acid residue in another Cas9 polypeptide. In some embodiments, the adenosine deaminase is inserted at the C-terminus of an amino acid selected from the group consisting of: 1015, 1022, 1029, 1040, 1068, 1247, 1054, 1026, 768, 1067, 1248, 1052, and 1246 as numbered in the above Cas9 reference sequence, or a corresponding amino acid residue in another Cas9 polypeptide. In some embodiments, the adenosine deaminase is inserted to replace an amino acid selected from the group consisting of: 1015, 1022, 1029, 1040, 1068, 1247, 1054, 1026, 768, 1067, 1248, 1052, and 1246 as numbered in the above Cas9 reference sequence, or a corresponding amino acid residue in another Cas9 polypeptide.

[0428] In some embodiments, a CBE (e.g., APOBEC1) is inserted at an amino acid residue selected from the group consisting of: 1016, 1023, 1029, 1040, 1069, and 1247 as numbered in the above Cas9 reference sequence, or a corresponding amino acid residue in another Cas9 polypeptide. In some embodiments, the ABE is inserted at the N-terminus of an amino acid selected from the group consisting of: 1016, 1023, 1029, 1040, 1069, and 1247 as numbered in the above Cas9 reference sequence, or a corresponding amino acid residue in another Cas9 polypeptide. In some embodiments, the ABE is inserted at the C-terminus of an amino acid selected from the group consisting of: 1016, 1023, 1029, 1040, 1069, and 1247 as numbered in the above Cas9 reference sequence, or a corresponding amino acid residue in another Cas9 polypeptide. In some embodiments, the ABE is inserted to replace an amino acid selected from the group consisting of: 1016, 1023, 1029, 1040, 1069, and 1247 as numbered in the above Cas9 reference sequence, or a corresponding amino acid residue in another Cas9 polypeptide.

[0429] In some embodiments, the deaminase (e.g., adenosine deaminase, cytidine deaminase, or adenosine deaminase and cytidine deaminase) is inserted at amino acid residue 768 as numbered in the above Cas9 reference sequence, or a corresponding amino acid residue in another Cas9 polypeptide. In some embodiments, the deaminase (e.g., adenosine deaminase, cytidine deaminase, or adenosine deaminase and cytidine deaminase) is inserted at the N-terminus of amino acid residue 768 as numbered in the above Cas9 reference sequence, or a corresponding amino acid residue in another Cas9 polypeptide. In some embodiments, the deaminase (e.g., adenosine deaminase, cytidine deaminase, or adenosine deaminase and cytidine deaminase) is inserted at the C-terminus of amino acid residue 768 as numbered in the above Cas9 reference sequence, or a corresponding amino acid residue in another Cas9 polypeptide. In some embodiments, the deaminase (e.g., adenosine deaminase, cytidine deaminase, or adenosine deaminase and cytidine deaminase) is inserted to replace amino acid residue 768 as numbered in the above Cas9 reference sequence, or a corresponding amino acid residue in another Cas9 polypeptide.

[0430] In some embodiments, the deaminase (e.g., adenosine deaminase, cytidine deaminase, or adenosine deaminase and cytidine deaminase) is inserted at amino acid residue 791 or is inserted at amino acid residue 792, as numbered in the above Cas9 reference sequence, or a corresponding amino acid residue in another Cas9 polypeptide. In some embodiments, the deaminase (e.g., adenosine deaminase, cytidine deaminase, or adenosine deaminase and cytidine deaminase) is inserted at the N-terminus of amino acid residue 791 or is inserted at the N-terminus of amino acid 792, as numbered in the above Cas9 reference sequence, or a corresponding amino acid residue in another Cas9 polypeptide. In some embodiments, the deaminase (e.g., adenosine deaminase, cytidine deaminase, or adenosine deaminase and cytidine deaminase) is inserted at the C-terminus of amino acid 791 or is inserted at the N-terminus of amino acid 792, as numbered in the above Cas9 reference sequence, or a corresponding amino acid residue in another Cas9 polypeptide. In some embodiments, the deaminase (e.g., adenosine deaminase, cytidine deaminase, or adenosine deaminase and cytidine deaminase) is inserted to replace amino acid 791, or is inserted to replace amino acid 792, as numbered in the above Cas9 reference sequence, or a corresponding amino acid residue in another Cas9 polypeptide.

[0431] In some embodiments, the deaminase (e.g., adenosine deaminase, cytidine deaminase, or adenosine deaminase and cytidine deaminase) is inserted at amino acid residue 1016 as numbered in the above Cas9 reference sequence, or a corresponding amino acid residue in another Cas9 polypeptide. In some embodiments, the deaminase (e.g., adenosine deaminase, cytidine deaminase, or adenosine deaminase and cytidine deaminase) is inserted at the N-terminus of amino acid residue 1016 as numbered in the above Cas9 reference sequence, or a corresponding amino acid residue in another Cas9 polypeptide. In some embodiments, the deaminase (e.g., adenosine deaminase, cytidine deaminase, or adenosine deaminase and cytidine deaminase) is inserted at the C-terminus of amino acid residue 1016 as numbered in the above Cas9 reference sequence, or a corresponding amino acid residue in another Cas9 polypeptide. In some embodiments, the deaminase (e.g., adenosine deaminase, cytidine deaminase, or adenosine deaminase and cytidine deaminase) is inserted to replace amino acid residue 1016 as numbered in the above Cas9 reference sequence, or a corresponding amino acid residue in another Cas9 polypeptide.

[0432] In some embodiments, the deaminase (e.g., adenosine deaminase, cytidine deaminase, or adenosine deaminase and cytidine deaminase) is inserted at amino acid residue 1022, or is inserted at amino acid residue 1023, as numbered in the above Cas9 reference sequence, or a corresponding amino acid residue in another Cas9 polypeptide. In some embodiments, the deaminase (e.g., adenosine deaminase, cytidine deaminase, or adenosine deaminase and cytidine deaminase) is inserted at the N-terminus of amino acid residue 1022 or is inserted at the N-terminus of amino acid residue 1023, as numbered in the above Cas9 reference sequence, or a corresponding amino acid residue in another Cas9 polypeptide. In some embodiments, the deaminase (e.g., adenosine deaminase, cytidine deaminase, or adenosine deaminase and cytidine deaminase) is inserted at the C-terminus of amino acid residue 1022 or is inserted at the C-terminus of amino acid residue 1023, as numbered in the above Cas9 reference sequence, or a corresponding amino acid residue in another Cas9 polypeptide. In some embodiments, the deaminase (e.g., adenosine deaminase, cytidine deaminase, or adenosine deaminase and cytidine deaminase) is inserted to replace amino acid residue 1022, or is inserted to replace amino acid residue 1023, as numbered in the above Cas9 reference sequence, or a corresponding amino acid residue in another Cas9 polypeptide.

[0433] In some embodiments, the deaminase (e.g., adenosine deaminase, cytidine deaminase, or adenosine deaminase and cytidine deaminase) is inserted at amino acid residue 1026, or is inserted at amino acid residue 1029, as numbered in the above Cas9 reference sequence, or a corresponding amino acid residue in another Cas9 polypeptide. In some embodiments, the deaminase (e.g., adenosine deaminase, cytidine deaminase, or adenosine deaminase and cytidine deaminase) is inserted at the N-terminus of amino acid residue 1026 or is inserted at the N-terminus of amino acid residue 1029, as numbered in the above Cas9 reference sequence, or a corresponding amino acid residue in another Cas9 polypeptide. In some embodiments, the deaminase (e.g., adenosine deaminase, cytidine deaminase, or adenosine deaminase and cytidine deaminase) is inserted at the C-terminus of amino acid residue 1026 or is inserted at the C-terminus of amino acid residue 1029, as numbered in the above Cas9 reference sequence, or a corresponding amino acid residue in another Cas9 polypeptide. In some embodiments, the deaminase (e.g., adenosine deaminase, cytidine deaminase, or adenosine deaminase and cytidine deaminase) is inserted to replace amino acid residue 1026, or is inserted to replace amino acid residue 1029, as numbered in the above Cas9 reference sequence, or corresponding amino acid residue in another Cas9 polypeptide.

[0434] In some embodiments, the deaminase (e.g., adenosine deaminase, cytidine deaminase, or adenosine deaminase and cytidine deaminase) is inserted at amino acid residue 1040 as numbered in the above Cas9 reference sequence, or a corresponding amino acid residue in another Cas9 polypeptide. In some embodiments, the deaminase (e.g., adenosine deaminase, cytidine deaminase, or adenosine deaminase and cytidine deaminase) is inserted at the N-terminus of amino acid residue 1040 as numbered in the above Cas9 reference sequence, or a corresponding amino acid residue in another Cas9 polypeptide. In some embodiments, the deaminase (e.g., adenosine deaminase, cytidine deaminase, or adenosine deaminase and cytidine deaminase) is inserted at the C-terminus of amino acid residue 1040 as numbered in the above Cas9 reference sequence, or a corresponding amino acid residue in another Cas9 polypeptide. In some embodiments, the deaminase (e.g., adenosine deaminase, cytidine deaminase, or adenosine deaminase and cytidine deaminase) is inserted to replace amino acid residue 1040 as numbered in the above Cas9 reference sequence, or a corresponding amino acid residue in another Cas9 polypeptide.

[0435] In some embodiments, the deaminase (e.g., adenosine deaminase, cytidine deaminase, or adenosine deaminase and cytidine deaminase) is inserted at amino acid residue 1052, or is inserted at amino acid residue 1054, as numbered in the above Cas9 reference sequence, or a corresponding amino acid residue in another Cas9 polypeptide. In some embodiments, the deaminase (e.g., adenosine deaminase, cytidine deaminase, or adenosine deaminase and cytidine deaminase) is inserted at the N-terminus of amino acid residue 1052 or is inserted at the N-terminus of amino acid residue 1054, as numbered in the above Cas9 reference sequence, or a corresponding amino acid residue in another Cas9 polypeptide. In some embodiments, the deaminase (e.g., adenosine deaminase, cytidine deaminase, or adenosine deaminase and cytidine deaminase) is inserted at the C-terminus of amino acid residue 1052 or is inserted at the C-terminus of amino acid residue 1054, as numbered in the above Cas9 reference sequence, or a corresponding amino acid residue in another Cas9 polypeptide. In some embodiments, the deaminase (e.g., adenosine deaminase, cytidine deaminase, or adenosine deaminase and cytidine deaminase) is inserted to replace amino acid residue 1052, or is inserted to replace amino acid residue 1054, as numbered in the above Cas9 reference sequence, or a corresponding amino acid residue in another Cas9 polypeptide.

[0436] In some embodiments, the deaminase (e.g., adenosine deaminase, cytidine deaminase, or adenosine deaminase and cytidine deaminase) is inserted at amino acid residue 1067, or is inserted at amino acid residue 1068, or is inserted at amino acid residue 1069, as numbered in the above Cas9 reference sequence, or a corresponding amino acid residue in another Cas9 polypeptide. In some embodiments, the deaminase (e.g., adenosine deaminase, cytidine deaminase, or adenosine deaminase and cytidine deaminase) is inserted at the N-terminus of amino acid residue 1067 or is inserted at the N-terminus of amino acid residue 1068 or is inserted at the N-terminus of amino acid residue 1069, as numbered in the above Cas9 reference sequence, or a corresponding amino acid residue in another Cas9 polypeptide. In some embodiments, the deaminase (e.g., adenosine deaminase, cytidine deaminase, or adenosine deaminase and cytidine deaminase) is inserted at the C-terminus of amino acid residue 1067 or is inserted at the C-terminus of amino acid residue 1068 or is inserted at the C-terminus of amino acid residue 1069, as numbered in the above Cas9 reference sequence, or a corresponding amino acid residue in another Cas9 polypeptide. In some embodiments, the deaminase (e.g., adenosine deaminase, cytidine deaminase, or adenosine deaminase and cytidine deaminase) is inserted to replace amino acid residue 1067, or is inserted to replace amino acid residue 1068, or is inserted to replace amino acid residue 1069, as numbered in the above Cas9 reference sequence, or a corresponding amino acid residue in another Cas9 polypeptide.

[0437] In some embodiments, the deaminase (e.g., adenosine deaminase, cytidine deaminase, or adenosine deaminase and cytidine deaminase) is inserted at amino acid residue 1246, or is inserted at amino acid residue 1247, or is inserted at amino acid residue 1248, as numbered in the above Cas9 reference sequence, or a corresponding amino acid residue in another Cas9 polypeptide. In some embodiments, the deaminase (e.g., adenosine deaminase, cytidine deaminase, or adenosine deaminase and cytidine deaminase) is inserted at the N-terminus of amino acid residue 1246 or is inserted at the N-terminus of amino acid residue 1247 or is inserted at the N-terminus of amino acid residue 1248, as numbered in the above Cas9 reference sequence, or a corresponding amino acid residue in another Cas9 polypeptide. In some embodiments, the deaminase (e.g., adenosine deaminase, cytidine deaminase, or adenosine deaminase and cytidine deaminase) is inserted at the C-terminus of amino acid residue 1246 or is inserted at the C-terminus of amino acid residue 1247 or is inserted at the C-terminus of amino acid residue 1248, as numbered in the above Cas9 reference sequence, or a corresponding amino acid residue in another Cas9 polypeptide. In some embodiments, the deaminase (e.g., adenosine deaminase, cytidine deaminase, or adenosine deaminase and cytidine deaminase) is inserted to replace amino acid residue 1246, or is inserted to replace amino acid residue 1247, or is inserted to replace amino acid residue 1248, as numbered in the above Cas9 reference sequence, or a corresponding amino acid residue in another Cas9 polypeptide.

[0438] In some embodiments, a heterologous polypeptide (e.g., deaminase) is inserted in a flexible loop of a Cas9 polypeptide. The flexible loop portions can be selected from the group consisting of 530-537, 569-570, 686-691, 943-947, 1002-1025, 1052-1077, 1232-1247, or 1298-1300 as numbered in the above Cas9 reference sequence, or a corresponding amino acid residue in another Cas9 polypeptide. The flexible loop portions can be selected from the group consisting of: 1-529, 538-568, 580-685, 692-942, 948-1001, 1026-1051, 1078-1231, or 1248-1297 as numbered in the above Cas9 reference sequence, or a corresponding amino acid residue in another Cas9 polypeptide.

[0439] A heterologous polypeptide (e.g., adenine deaminase) can be inserted into a Cas9 polypeptide region corresponding to amino acid residues: 1017-1069, 1242-1247, 1052-1056, 1060-1077, 1002-1003, 943-947, 530-537, 568-579, 686-691, 1242-1247, 1298-1300, 1066-1077, 1052-1056, or 1060-1077 as numbered in the above Cas9 reference sequence, or a corresponding amino acid residue in another Cas9 polypeptide.

[0440] A heterologous polypeptide (e.g., adenine deaminase) can be inserted in place of a deleted region of a Cas9 polypeptide. The deleted region can correspond to an N-terminal or C-terminal portion of the Cas9 polypeptide. In some embodiments, the deleted region corresponds to residues 792-872 as numbered in the above Cas9 reference sequence, or a corresponding amino acid residue in another Cas9 polypeptide. In some embodiments, the deleted region corresponds to residues 792-906 as numbered in the above Cas9 reference sequence, or a corresponding amino acid residue in another Cas9 polypeptide. In some embodiments, the deleted region corresponds to residues 2-791 as numbered in the above Cas9 reference sequence, or a corresponding amino acid residue in another Cas9 polypeptide. In some embodiments, the deleted region corresponds to residues 1017-1069 as numbered in the above Cas9 reference sequence, or corresponding amino acid residues thereof.

[0441] Exemplary internal fusions base editors are provided in Table 5A below:

TABLE 5A
Insertion loci in Cas9 proteins

| BE ID | Modification | Other ID |
|---|---|---|
| IBE001 | Cas9 TadA ins 1015 | ISLAY01 |
| IBE002 | Cas9 TadA ins 1022 | ISLAY02 |
| IBE003 | Cas9 TadA ins 1029 | ISLAY03 |
| IBE004 | Cas9 TadA ins 1040 | ISLAY04 |
| IBE005 | Cas9 TadA ins 1068 | ISLAY05 |
| IBE006 | Cas9 TadA ins 1247 | ISLAY06 |
| IBE007 | Cas9 TadA ins 1054 | ISLAY07 |
| IBE008 | Cas9 TadA ins 1026 | ISLAY08 |
| IBE009 | Cas9 TadA ins 768 | ISLAY09 |
| IBE020 | delta HNH TadA 792 | ISLAY20 |
| IBE021 | N-term fusion single TadA helix | ISLAY21 |
| | truncated 165-end | |
| IBE029 | TadA-Circular Permutant116 ins1067 | ISLAY29 |
| IBE031 | TadA- Circular Permutant 136 ins1248 | ISLAY31 |
| IBE032 | TadA- Circular Permutant 136ins 1052 | ISLAY32 |
| IBE035 | delta 792-872 TadA ins | I LAY35 |
| IBE036 | delta 792-906 TadA ins | ISLAY36 |
| IBE043 | TadA-Circular Permutant 65 ins1246 | ISLAY43 |
| IBE044 | TadA ins C-term truncate2 791 | ISLAY44 |

[0442] A heterologous polypeptide (e.g., deaminase) can be inserted within a structural or functional domain of a Cas9 polypeptide. A heterologous polypeptide (e.g., deaminase) can be inserted between two structural or functional domains of a Cas9 polypeptide. A heterologous polypeptide (e.g., deaminase) can be inserted in place of a structural or functional domain of a Cas9 polypeptide, for example, after deleting the domain from the Cas9 polypeptide. The structural or functional domains of a Cas9 polypeptide can include, for example, RuvC I, RuvC II, RuvC III, Rec1, Rec2, PI, or HNH.

[0443] In some embodiments, the Cas9 polypeptide lacks one or more domains selected from the group consisting of: RuvC I, RuvC II, RuvC III, Rec1, Rec2, PI, or HNH domain. In some embodiments, the Cas9 polypeptide lacks a nuclease domain. In some embodiments, the Cas9 polypeptide lacks an HNH domain. In some embodiments, the Cas9 polypeptide lacks a portion of the HNH domain such that the Cas9 polypeptide has reduced or abolished HNH activity. In some embodiments, the Cas9 polypeptide comprises a deletion of the nuclease domain, and the deaminase is inserted to replace the nuclease domain. In some embodiments, the HNH domain is deleted and the deaminase is inserted in its place. In some embodiments, one or more of the RuvC domains is deleted and the deaminase is inserted in its place.

[0444] A fusion protein comprising a heterologous polypeptide can be flanked by a N-terminal and a C-terminal fragment of a napDNAbp. In some embodiments, the fusion protein comprises a deaminase flanked by a N-terminal fragment and a C-terminal fragment of a Cas9 polypeptide. The N terminal fragment or the C terminal fragment can bind the target polynucleotide sequence. The C-terminus of the N terminal fragment or the N-terminus of the C terminal fragment can comprise a part of a flexible loop of a Cas9 polypeptide. The C-terminus of the N terminal fragment or the N-terminus of the C terminal fragment can comprise a part of an alpha-helix structure of the Cas9 polypeptide. The N-terminal fragment or the C-terminal fragment can comprise a DNA binding domain. The N-terminal fragment or the C-terminal fragment can comprise a RuvC domain. The N-terminal fragment or the C-terminal fragment can comprise an HNH domain. In some embodiments, neither of the N-terminal fragment and the C-terminal fragment comprises an HNH domain.

[0445] In some embodiments, the C-terminus of the N terminal Cas9 fragment comprises an amino acid that is in proximity to a target nucleobase when the fusion protein deaminates the target nucleobase. In some embodiments, the N-terminus of the C terminal Cas9 fragment comprises an amino acid that is in proximity to a target nucleobase when the fusion protein deaminates the target nucleobase. The insertion location of different deaminases can be different in order to have proximity between the target nucleobase and an amino acid in the C-terminus of the N terminal Cas9 fragment or the N-terminus of the C terminal Cas9 fragment. For example, the insertion position of an ABE can be at an amino acid residue selected from the group consisting of: 1015, 1022, 1029, 1040, 1068, 1247, 1054, 1026, 768, 1067, 1248, 1052, and 1246 as numbered in the above Cas9 reference sequence, or a corresponding amino acid residue in another Cas9 polypeptide.

[0446] The N-terminal Cas9 fragment of a fusion protein (i.e. the N-terminal Cas9 fragment flanking the deaminase in a fusion protein) can comprise the N-terminus of a Cas9 polypeptide. The N-terminal Cas9 fragment of a fusion protein can comprise a length of at least about: 100, 200, 300, 400, 500, 600, 700, 800, 900, 1000, 1100, 1200, or 1300 amino acids. The N-terminal Cas9 fragment of a fusion protein can comprise a sequence corresponding to amino acid residues: 1-56, 1-95, 1-200, 1-300, 1-400, 1-500, 1-600, 1-700, 1-718, 1-765, 1-780, 1-906, 1-918, or 1-1100 as numbered in the above Cas9 reference sequence, or a corresponding amino acid residue in another Cas9 polypeptide. The N-terminal Cas9 fragment can comprise a sequence comprising at least: 85%, at least 90%, at least 91%, at least 92%, at least 93%, at least 94%, at least 95%, at least 96%, at least 97%, at least 98%, at least 99%, or at least 99.5% sequence identity to amino acid residues: 1-56, 1-95, 1-200, 1-300, 1-400, 1-500, 1-600, 1-700, 1-718, 1-765, 1-780, 1-906, 1-918, or 1-1100 as numbered in the above Cas9 reference sequence, or a corresponding amino acid residue in another Cas9 polypeptide.

[0447] The C-terminal Cas9 fragment of a fusion protein (i.e. the C-terminal Cas9 fragment flanking the deaminase in a fusion protein) can comprise the C-terminus of a Cas9 polypeptide. The C-terminal Cas9 fragment of a fusion protein can comprise a length of at least about: 100, 200, 300, 400, 500, 600, 700, 800, 900, 1000, 1100, 1200, or 1300 amino acids. The C-terminal Cas9 fragment of a fusion protein can comprise a sequence corresponding to amino acid residues: 1099-1368, 918-1368, 906-1368, 780-1368, 765-1368, 718-1368, 94-1368, or 56-1368 as numbered in the above Cas9 reference sequence, or a corresponding amino acid residue in another Cas9 polypeptide. The N-terminal Cas9 fragment can comprise a sequence comprising at least: 85%, at least 90%, at least 91%, at least 92%, at least 93%, at least 94%, at least 95%, at least 96%, at least 97%, at least 98%, at least 99%, or at least 99.5% sequence identity to amino acid residues: 1099-1368, 918-1368, 906-1368, 780-1368, 765-1368, 718-1368, 94-1368, or 56-1368 as numbered in the above Cas9 reference sequence, or a corresponding amino acid residue in another Cas9 polypeptide.

[0448] The N-terminal Cas9 fragment and C-terminal Cas9 fragment of a fusion protein taken together may not correspond to a full-length naturally occurring Cas9 polypeptide sequence, for example, as set forth in the above Cas9 reference sequence.

[0449] The fusion protein described herein can effect targeted deamination with reduced deamination at non-target sites (e.g., off-target sites), such as reduced genome wide spurious deamination. The fusion protein described herein can effect targeted deamination with reduced bystander deamination at non-target sites. The undesired deamination or off-target deamination can be reduced by at least 30%, at least 40%, at least 50%, at least 60%, at least 70%, at least 80%, at least 90%, at least 95%, or at least 99% compared with, for example, an end terminus fusion protein comprising the deaminase fused to a N terminus or a C terminus of a Cas9 polypeptide. The undesired deamination or off-target deamination can be reduced by at least one-fold, at least two-fold, at least three-fold, at least four-fold, at least five-fold, at least tenfold, at least fifteen fold, at least twenty fold, at least thirty fold, at least forty fold, at least fifty fold, at least 60 fold, at least 70 fold, at least 80 fold, at least 90 fold, or at least hundred fold, compared with, for example, an end terminus fusion protein comprising the deaminase fused to a N terminus or a C terminus of a Cas9 polypeptide.

[0450] In some embodiments, the deaminase (e.g., adenosine deaminase, cytidine deaminase, or adenosine deaminase and cytidine deaminase) of the fusion protein deaminates no more than two nucleobases within the range of an R-loop. In some embodiments, the deaminase of the fusion protein deaminates no more than three nucleobases within the range of the R-loop. In some embodiments, the deaminase of the fusion protein deaminates no more than 2, 3, 4, 5, 6, 7, 8, 9, or 10 nucleobases within the range of the R-loop. An R-loop is a three-stranded nucleic acid structure including a DNA:RNA hybrid, a DNA:DNA or an RNA:RNA complementary structure and the associated with single-stranded DNA. As used herein, an R-loop may be formed when a target polynucleotide is contacted with a CRISPR complex or a base editing complex, wherein a portion of a guide polynucleotide, e.g. a guide RNA, hybridizes with and displaces with a portion of a target polynucleotide, e.g. a target DNA. In some embodiments, an R-loop comprises a hybridized region of a spacer sequence and a target DNA complementary sequence. An R-loop region may be of about 5, 6, 7, 8, 9, 10, 11, 12, 13, 14, 15, 16, 17, 18, 19, 20, 21, 22, 23, 24, 25, 26, 27, 28, 29, 30, 31, 32, 33, 34, 35, 36, 37, 38, 39, 40, 41, 42, 43, 44, 45, 46, 47, 48, 49, or 50 nucleobase pairs in length. In some embodiments, the R-loop region is about 20 nucleobase pairs in length. It should be understood that, as used herein, an R-loop region is not limited to the target DNA strand that hybridizes with the guide polynucleotide. For example, editing of a target nucleobase within an R-loop region may be to a DNA strand that comprises the complementary strand to a guide RNA, or may be to a DNA strand that is the opposing strand of the strand complementary to the guide RNA. In some embodiments, editing in the region of the R-loop comprises editing a nucleobase on non-complementary strand (protospacer strand) to a guide RNA in a target DNA sequence.

[0451] The fusion protein described herein can effect target deamination in an editing window different from canonical base editing. In some embodiments, a target nucleobase is from about 1 to about 20 bases upstream of a PAM sequence in the target polynucleotide sequence. In some embodiments, a target nucleobase is from about 2 to about 12 bases upstream of a PAM sequence in the target polynucleotide sequence. In some embodiments, a target nucleobase is from about 1 to 9 base pairs, about 2 to 10 base pairs, about 3 to 11 base pairs, about 4 to 12 base pairs, about 5 to 13 base pairs, about 6 to 14 base pairs, about 7 to 15 base pairs, about 8 to 16 base pairs, about 9 to 17 base pairs, about 10 to 18 base pairs, about 11 to 19 base pairs, about 12 to 20 base pairs, about 1 to 7 base pairs, about 2 to 8 base pairs, about 3 to 9 base pairs, about 4 to 10 base pairs, about 5 to 11 base pairs, about 6 to 12 base pairs, about 7 to 13 base pairs, about 8 to 14 base pairs, about 9 to 15 base pairs, about 10 to 16 base pairs, about 11 to 17 base pairs, about 12 to 18 base pairs, about 13 to 19 base pairs, about 14 to 20 base pairs, about 1 to 5 base pairs, about 2 to 6 base pairs, about 3 to 7 base pairs, about 4 to 8 base pairs, about 5 to 9 base pairs, about 6 to 10 base pairs, about 7 to 11 base pairs, about 8 to 12 base pairs, about 9 to 13 base pairs, about 10 to 14 base pairs, about 11 to 15 base pairs, about 12 to 16 base pairs, about 13 to 17 base pairs, about 14 to 18 base pairs, about 15 to 19 base pairs, about 16 to 20 base pairs, about 1 to 3 base pairs, about 2 to 4 base pairs, about 3 to 5 base pairs, about 4 to 6 base pairs, about 5 to 7 base pairs, about 6 to 8 base pairs, about 7 to 9 base pairs, about 8 to 10 base pairs, about 9 to 11 base pairs, about 10 to 12 base pairs, about 11 to 13 base pairs, about 12 to 14 base pairs, about 13 to 15 base pairs, about 14 to 16 base pairs, about 15 to 17 base pairs, about 16 to 18 base pairs, about 17 to 19 base pairs, about 18 to 20 base pairs away or upstream of the PAM sequence. In some embodiments, a target nucleobase is about 1, 2, 3, 4, 5, 6, 7, 8, 9, 10, 11, 12, 13, 14, 15, 16, 17, 18, 19, 20, or more base pairs away from or upstream of the PAM sequence. In some embodiments, a target nucleobase is about 1, 2, 3, 4, 5, 6, 7, 8, or 9 base pairs upstream of the PAM sequence. In some embodiments, a target nucleobase is about 2, 3, 4, or 6 base pairs upstream of the PAM sequence.

[0452] The fusion protein can comprise more than one heterologous polypeptide. For example, the fusion protein can additionally comprise one or more UGI domains and/or one or more nuclear localization signals. The two or more heterologous domains can be inserted in tandem. The two or more heterologous domains can be inserted at locations such that they are not in tandem in the NapDNAbp.

[0453] A fusion protein can comprise a linker between the deaminase and the napDNAbp polypeptide. The linker can be a peptide or a non-peptide linker. For example, the linker can be an XTEN, (GGGS)n, (GGGGS)n, (G)n, (EAAAK)n, (GGS)n, SGSETPGTSESATPES. In some embodiments, the fusion protein comprises a linker between the N-terminal Cas9 fragment and the deaminase. In some embodiments, the fusion protein comprises a linker between the C-terminal Cas9 fragment and the deaminase. In some embodiments, the N-terminal and C-terminal fragments of napDNAbp are connected to the deaminase with a linker. In some embodiments, the N-terminal and C-terminal fragments are joined to the deaminase domain without a linker. In some embodiments, the fusion protein comprises a linker between the N-terminal Cas9 fragment and the deaminase, but does not comprise a linker between the C-terminal Cas9 fragment and the deaminase. In some embodiments, the fusion protein comprises a linker between the C-terminal Cas9 fragment and the deaminase, but does not comprise a linker between the N-terminal Cas9 fragment and the deaminase.

[0454] In some embodiments, the napDNAbp in the fusion protein is a Cas12 polypeptide, e.g., Cas12b/C2c1, or a fragment thereof. The Cas12 polypeptide can be a variant Cas12 polypeptide. In other embodiments, the N- or C-terminal fragments of the Cas12 polypeptide comprise a nucleic acid programmable DNA binding domain or a RuvC domain. In other embodiments, the fusion protein contains a linker between the Cas12 polypeptide and the catalytic domain. In other embodiments, the amino acid sequence of the linker is GGSGGS or GSSGSETPGTSESATPESSG. In other embodiments, the linker is a rigid linker. In other embodiments of the above aspects, the linker is encoded by GGAGGCTCTGGAGGAAGC or GGCTCTTCTGGATCTGAAACACCTGGCACAAGCGAGAGCGCCACCCCTGAGAGCTCTGGC.

[0455] Fusion proteins comprising a heterologous catalytic domain flanked by N- and C-terminal fragments of a Cas12 polypeptide are also useful for base editing in the methods as described herein. Fusion proteins comprising Cas12 and one or more deaminase domains, e.g., adenosine deaminase, or comprising an adenosine deaminase domain flanked by Cas12 sequences are also useful for highly specific and efficient base editing of target sequences. In an embodiment, a chimeric Cas12 fusion protein contains a heterologous catalytic domain (e.g., adenosine deaminase, cytidine deaminase, or adenosine deaminase and cytidine deaminase) inserted within a Cas12 polypeptide. In some embodiments, the fusion protein comprises an adenosine deaminase domain and a cytidine deaminase domain inserted within a Cas12. In some embodiments, an adenosine deaminase is fused within Cas12 and a cytidine deaminase is fused to the C-terminus. In some embodiments, an adenosine deaminase is fused within Cas12 and a cytidine deaminase fused to the N-terminus. In some embodiments, a cytidine deaminase is fused within Cas12 and an adenosine deaminase is fused to the C-terminus. In some embodiments, a cytidine deaminase is fused within Cas12 and an adenosine deaminase fused to the N-terminus. Exemplary structures of a fusion protein with an adenosine deaminase and a cytidine deaminase and a Cas12 are provided as follows:

[0456] NH₂-[Cas12(adenosine deaminase)]-[cytidine deaminase]-COOH;

[0457] NH₂-[cytidine deaminase]-[Cas12(adenosine deaminase)]-COOH;

[0458] NH₂-[Cas12(cytidine deaminase)]-[adenosine deaminase]-COOH; or

[0459] NH₂-[adenosine deaminase]-[Cas12(cytidine deaminase)]-COOH;

In some embodiments, the “-” used in the general architecture above indicates the presence of an optional linker.

[0460] In various embodiments, the catalytic domain has DNA modifying activity (e.g., deaminase activity), such as adenosine deaminase activity. In some embodiments, the adenosine deaminase is a TadA (e.g., TadA7.10). In some embodiments, the TadA is a TadA*8. In some embodiments, a TadA*8 is fused within Cas12 and a cytidine deaminase is fused to the C-terminus. In some embodiments, a TadA*8 is fused within Cas12 and a cytidine deaminase fused to the N-terminus. In some embodiments, a cytidine deaminase is fused within Cas12 and a TadA*8 is fused to the C-terminus. In some embodiments, a cytidine deaminase is fused within Cas12 and a TadA*8 fused to the N-terminus. Exemplary structures of a fusion protein with a TadA*8 and a cytidine deaminase and a Cas12 are provided as follows:

[0461] N-[Cas12(TadA*8)]-[cytidine deaminase]-C;

[0462] N-[cytidine deaminase]-[Cas12(TadA*8)]-C;

[0463] N-[Cas12(cytidine deaminase)]-[TadA*8]-C; or

[0464] N-[TadA*8]-[Cas12(cytidine deaminase)]-C.

In some embodiments, the “-” used in the general architecture above indicates the presence of an optional linker.

[0465] In other embodiments, the fusion protein contains one or more catalytic domains. In other embodiments, at least one of the one or more catalytic domains is inserted within the Cas12 polypeptide or is fused at the Cas12 N-terminus or C-terminus. In other embodiments, at least one of the one or more catalytic domains is inserted within a loop, an alpha helix region, an unstructured portion, or a solvent accessible portion of the Cas12 polypeptide. In other embodiments, the Cas12 polypeptide is Cas12a, Cas12b, Cas12c, Cas12d, Cas12e, Cas12g, Cas12h, or Cas12i. In other embodiments, the Cas12 polypeptide has at least about 85% amino acid sequence identity to Bacillus hisashii Cas12b, Bacillus thermoamylovorans Cas12b, Bacillus sp. V3-13 Cas12b, or Alicyclobacillus acidiphilus Cas12b. In other embodiments, the Cas12 polypeptide has at least about 90% amino acid sequence identity to Bacillus hisashii Cas12b, Bacillus thermoamylovorans Cas12b, Bacillus sp. V3-13 Cas12b, or Alicyclobacillus acidiphilus Cas12b. In other embodiments, the Cas12 polypeptide has at least about 95% amino acid sequence identity to Bacillus hisashii Cas12b, Bacillus thermoamylovorans Cas12b, Bacillus sp. V3-13 Cas12b, or Alicyclobacillus acidiphilus Cas12b. In other embodiments, the Cas12 polypeptide contains or consists essentially of a fragment of Bacillus hisashii Cas12b, Bacillus thermoamylovorans Cas12b, Bacillus sp. V3-13 Cas12b, or Alicyclobacillus acidiphilus Cas12b.

[0466] In other embodiments, the catalytic domain is inserted between amino acid positions 153-154, 255-256, 306-307, 980-981, 1019-1020, 534-535, 604-605, or 344-345 of BhCas12b or a corresponding amino acid residue of Cas12a, Cas12c, Cas12d, Cas12e, Cas12g, Cas12h, or Cas12i. In other embodiments, the catalytic domain is inserted between amino acids P153 and S154 of BhCas12b. In other embodiments, the catalytic domain is inserted between amino acids K255 and E256 of BhCas12b. In other embodiments, the catalytic domain is inserted between amino acids D980 and G981 of BhCas12b. In other embodiments, the catalytic domain is inserted between amino acids K1019 and L1020 of BhCas12b. In other embodiments, the catalytic domain is inserted between amino acids F534 and P535 of BhCas12b. In other embodiments, the catalytic domain is inserted between amino acids K604 and G605 of BhCas12b. In other embodiments, the catalytic domain is inserted between amino acids H344 and F345 of BhCas12b. In other embodiments, catalytic domain is inserted between amino acid positions 147 and 148, 248 and 249, 299 and 300, 991 and 992, or 1031 and 1032 of BvCas12b or a corresponding amino acid residue of Cas12a, Cas12c, Cas12d, Cas12e, Cas12g, Cas12h, or Cas12i. In other embodiments, the catalytic domain is inserted between amino acids P147 and D148 of BvCas12b. In other embodiments, the catalytic domain is inserted between amino acids G248 and G249 of BvCas12b. In other embodiments, the catalytic domain is inserted between amino acids P299 and E300 of BvCas12b. In other embodiments, the catalytic domain is inserted between amino acids G991 and E992 of BvCas12b. In other embodiments, the catalytic domain is inserted between amino acids K1031 and M1032 of BvCas12b. In other embodiments, the catalytic domain is inserted between amino acid positions 157 and 158, 258 and 259, 310 and 311, 1008 and 1009, or 1044 and 1045 of AaCas12b or a corresponding amino acid residue of Cas12a, Cas12c, Cas12d, Cas12e, Cas12g, Cas12h, or Cas12i. In other embodiments, the catalytic domain is inserted between amino acids P157 and G158 of AaCas12b. In other embodiments, the catalytic domain is inserted between amino acids V258 and G259 of AaCas12b. In other embodiments, the catalytic domain is inserted between amino acids D310 and P311 of AaCas12b. In other embodiments, the catalytic domain is inserted between amino acids G1008 and E1009 of AaCas12b. In other embodiments, the catalytic domain is inserted between amino acids G1044 and K1045 at of AaCas12b.

[0467] In other embodiments, the fusion protein contains a nuclear localization signal (e.g., a bipartite nuclear localization signal). In other embodiments, the amino acid sequence of the nuclear localization signal is MAPKKKRKVGIHGVPAA. In other embodiments of the above aspects, the nuclear localization signal is encoded by the following sequence: ATGGCCCCAAAGAAGAAGCGGAAGGTCGGTATCCACGGAGTCCCAGCAGCC. In other embodiments, the Cas12b polypeptide contains a mutation that silences the catalytic activity of a RuvC domain. In other embodiments, the Cas12b polypeptide contains D574A, D829A and/or D952A mutations. In other embodiments, the fusion protein further contains a tag (e.g., an influenza hemagglutinin tag).

[0468] In some embodiments, the fusion protein comprises a napDNAbp domain (e.g., Cas12-derived domain) with an internally fused nucleobase editing domain (e.g., all or a portion of a deaminase domain, e.g., an adenosine deaminase domain). In some embodiments, the napDNAbp is a Cas12b. In some embodiments, the base editor comprises a BhCas12b domain with an internally fused TadA*8 domain inserted at the loci provided in Table 6 below.

TABLE 6
Insertion loci in Cas12b proteins

| BhCas12b | Insertion site | Inserted between aa |
|---|---|---|
| position 1 | 153 | PS |
| position 2 | 255 | KE |
| position 3 | 306 | DE |
| position 4 | 980 | DG |
| position 5 | 1019 | KL |
| position 6 | 534 | FP |
| position 7 | 604 | KG |
| position 8 | 344 | HF |
| BvCas12b | Insertion site | Inserted between aa |
| position 1 | 147 | PD |
| position 2 | 248 | GG |
| position 3 | 299 | PE |
| position 4 | 991 | GE |
| position 5 | 1031 | KM |
| AaCas12b | Insertion site | Inserted between aa |
| position 1 | 157 | PG |
| position 2 | 258 | VG |
| position 3 | 310 | DP |
| position 4 | 1008 | GE |
| position 5 | 1044 | GK |

[0469] By way of nonlimiting example, an adenosine deaminase (e.g., ABE8.13) may be inserted into a BhCas12b to produce a fusion protein (e.g., ABE8.13-BhCas12b) that effectively edits a nucleic acid sequence.

[0470] In some embodiments, the base editing system described herein comprises an ABE with TadA inserted into a Cas9. Sequences of relevant ABEs with TadA inserted into a Cas9 are provided.

101 Cas9 TadAins 1015
MDKKYSIGLAIGTNSVGWAVITDEYKVPSKKFKVLGNTDRHSIKKNLIGA
LLFDSGETAEATRLKRTARRRYTRRKNRICYLQEIFSNEMAKVDDSFFHR
LEESFLVEEDKKHERHPIFGNIVDEVAYHEKYPTIYHLRKKLVDSTDKAD
LRLIYLALAHMIKFRGHFLIEGDLNPDNSDVDKLFIQLVQTYNQLFEENP
INASGVDAKAILSARLSKSRRLENLIAQLPGEKKNGLFGNLIALSLGLTP
NFKSNFDLAEDAKLQLSKDTYDDDLDNLLAQIGDQYADLFLAAKNLSDAI
LLSDILRVNTEITKAPLSASMIKRYDEHHQDLTLLKALVRQQLPEKYKEI
FFDQSKNGYAGYIDGGASQEEFYKFIKPILEKMDGTEELLVKLNREDLLR
KQRTFDNGSIPHQIHLGELHAILRRQEDFYPFLKDNREKIEKILTFRIPY
YVGPLARGNSRFAWMTRKSEETITPWNFEEVVDKGASAQSFIERMTNFDK
NLPNEKVLPKHSLLYEYFTVYNELTKVKYVTEGMRKPAFLSGEQKKAIVD
LLFKTNRKVTVKQLKEDYFKKIECFDSVEISGVEDRFNASLGTYHDLLKI
IKDKDFLDNEENEDILEDIVLTLTLFEDREMIEERLKTYAHLFDDKVMKQ
LKRRRYTGWGRLSRKLINGIRDKQSGKTILDFLKSDGFANRNFMQLIHDD
SLTFKEDIQKAQVSGQGDSLHEHIANLAGSPAIKKGILQTVKVVDELVKV
MGRHKPENIVIEMARENQTTQKGQKNSRERMKRIEEGIKELGSQILKEHP
VENTQLQNEKLYLYYLQNGRDMYVDQELDINRLSDYDVDHIVPQSFLKDD
SIDNKVLTRSDKNRGKSDNVPSEEVVKKMKNYWRQLLNAKLITQRKFDNL
TKAERGGLSELDKAGFIKRQLVETRQITKHVAQILDSRMNTKYDENDKLI
REVKVITLKSKLVSDFRKDFQFYKVREINNYHHAHDAYLNAVVGTALIKK
YPKLESEFVYGDYKVGSSGSETPGTSESATPESSGSEVEFSHEYWMRHAL
TLAKRARDEREVPVGAVLVLNNRVIGEGWNRAIGLHDPTAHAEIMALRQG
GLVMQNYRLIDATLYVTFEPCVMCAGAMIHSRIGRVVFGVRNAKTGAAGS
LMDVLHYPGMNHRVEITEGILADECAALLCYFFRMPRQVFNAQKKAQSST
DYDVRKMIAKSEQEIGKATAKYFFYSNIMNFFKTEITLANGEIRKRPLIE
TNGETGEIVWDKGRDFATVRKVLSMPQVNIVKKTEVQTGGFSKESILPKR
NSDKLIARKKDWDPKKYGGFDSPTVAYSVLVVAKVEKGKSKKLKSVKELL
GITIMERSSFEKNPIDFLEAKGYKEVKKDLIIKLPKYSLFELENGRKRML
ASAGELQKGNELALPSKYVNFLYLASHYEKLKGSPEDNEQKQLFVEQHKH
YLDEIIEQISEFSKRVILADANLDKVLSAYNKHRDKPIREQAENIIHLFT
LTNLGAPAAFKYFDTTIDRKRYTSTKEVLDATLIHQSITGLYETRIDLSQ
LGGD
102 Cas9 TadAins 1022
MDKKYSIGLAIGTNSVGWAVITDEYKVPSKKFKVLGNTDRHSIKKNLIGA
LLFDSGETAEATRLKRTARRRYTRRKNRICYLQEIFSNEMAKVDDSFFHR
LEESFLVEEDKKHERHPIFGNIVDEVAYHEKYPTIYHLRKKLVDSTDKAD
LRLIYLALAHMIKFRGHFLIEGDLNPDNSDVDKLFIQLVQTYNQLFEENP
INASGVDAKAILSARLSKSRRLENLIAQLPGEKKNGLFGNLIALSLGLTP
NFKSNFDLAEDAKLQLSKDTYDDDLDNLLAQIGDQYADLFLAAKNLSDAI
LLSDILRVNTEITKAPLSASMIKRYDEHHQDLTLLKALVRQQLPEKYKEI
FFDQSKNGYAGYIDGGASQEEFYKFIKPILEKMDGTEELLVKLNREDLLR
KQRTFDNGSIPHQIHLGELHAILRRQEDFYPFLKDNREKIEKILTFRIPY
YVGPLARGNSRFAWMTRKSEETITPWNFEEVVDKGASAQSFIERMTNFDK
NLPNEKVLPKHSLLYEYFTVYNELTKVKYVTEGMRKPAFLSGEQKKAIVD
LLFKTNRKVTVKQLKEDYFKKIECFDSVEISGVEDRFNASLGTYHDLLKI
IKDKDFLDNEENEDILEDIVLTLTLFEDREMIEERLKTYAHLFDDKVMKQ
LKRRRYTGWGRLSRKLINGIRDKQSGKTILDFLKSDGFANRNFMQLIHDD
SLTFKEDIQKAQVSGQGDSLHEHIANLAGSPAIKKGILQTVKVVDELVKV
MGRHKPENIVIEMARENQTTQKGQKNSRERMKRIEEGIKELGSQILKEHP
VENTQLQNEKLYLYYLQNGRDMYVDQELDINRLSDYDVDHIVPQSFLKDD
SIDNKVLTRSDKNRGKSDNVPSEEVVKKMKNYWRQLLNAKLITQRKFDNL
TKAERGGLSELDKAGFIKRQLVETRQITKHVAQILDSRMNTKYDENDKLI
REVKVITLKSKLVSDFRKDFQFYKVREINNYHHAHDAYLNAVVGTALIKK
YPKLESEFVYGDYKVYDVRKMIGSSGSETPGTSESATPESSGSEVEFSHE
YWMRHALTLAKRARDEREVPVGAVLVLNNRVIGEGWNRAIGLHDPTAHAE
IMALRQGGLVMQNYRLIDATLYVTFEPCVMCAGAMIHSRIGRVVFGVRNA
KTGAAGSLMDVLHYPGMNHRVEITEGILADECAALLCYFFRMPRQVFNAQ
KKAQSSTDAKSEQEIGKATAKYFFYSNIMNFFKTEITLANGEIRKRPLIE
TNGETGEIVWDKGRDFATVRKVLSMPQVNIVKKTEVQTGGFSKESILPKR
NSDKLIARKKDWDPKKYGGFDSPTVAYSVLVVAKVEKGKSKKLKSVKELL
GITIMERSSFEKNPIDFLEAKGYKEVKKDLIIKLPKYSLFELENGRKRML
ASAGELQKGNELALPSKYVNFLYLASHYEKLKGSPEDNEQKQLFVEQHKH
YLDEIIEQISEFSKRVILADANLDKVLSAYNKHRDKPIREQAENIIHLFT
LTNLGAPAAFKYFDTTIDRKRYTSTKEVLDATLIHQSITGLYETRIDLSQ
LGGD
103 Cas9 TadAins 1029
MDKKYSIGLAIGTNSVGWAVITDEYKVPSKKFKVLGNTDRHSIKKNLIGA
LLFDSGETAEATRLKRTARRRYTRRKNRICYLQEIFSNEMAKVDDSFFHR
LEESFLVEEDKKHERHPIFGNIVDEVAYHEKYPTIYHLRKKLVDSTDKAD
LRLIYLALAHMIKFRGHFLIEGDLNPDNSDVDKLFIQLVQTYNQLFEENP
INASGVDAKAILSARLSKSRRLENLIAQLPGEKKNGLFGNLIALSLGLTP
NFKSNFDLAEDAKLQLSKDTYDDDLDNLLAQIGDQYADLFLAAKNLSDAI
LLSDILRVNTEITKAPLSASMIKRYDEHHQDLTLLKALVRQQLPEKYKEI
FFDQSKNGYAGYIDGGASQEEFYKFIKPILEKMDGTEELLVKLNREDLLR
KQRTFDNGSIPHQIHLGELHAILRRQEDFYPFLKDNREKIEKILTFRIPY
YVGPLARGNSRFAWMTRKSEETITPWNFEEVVDKGASAQSFIERMTNFDK
NLPNEKVLPKHSLLYEYFTVYNELTKVKYVTEGMRKPAFLSGEQKKAIVD
LLFKTNRKVTVKQLKEDYFKKIECFDSVEISGVEDRFNASLGTYHDLLKI
IKDKDFLDNEENEDILEDIVLTLTLFEDREMIEERLKTYAHLFDDKVMKQ
LKRRRYTGWGRLSRKLINGIRDKQSGKTILDFLKSDGFANRNFMQLIHDD
SLTFKEDIQKAQVSGQGDSLHEHIANLAGSPAIKKGILQTVKVVDELVKV
MGRHKPENIVIEMARENQTTQKGQKNSRERMKRIEEGIKELGSQILKEHP
VENTQLQNEKLYLYYLQNGRDMYVDQELDINRLSDYDVDHIVPQSFLKDD
SIDNKVLTRSDKNRGKSDNVPSEEVVKKMKNYWRQLLNAKLITQRKFDNL
TKAERGGLSELDKAGFIKRQLVETRQITKHVAQILDSRMNTKYDENDKLI
REVKVITLKSKLVSDFRKDFQFYKVREINNYHHAHDAYLNAVVGTALIKK
YPKLESEFVYGDYKVYDVRKMIAKSEQEIGSSGSETPGTSESATPESSGS
EVEFSHEYWMRHALTLAKRARDEREVPVGAVLVLNNRVIGEGWNRAIGLH
DPTAHAEIMALRQGGLVMQNYRLIDATLYVTFEPCVMCAGAMIHSRIGRV
VFGVRNAKTGAAGSLMDVLHYPGMNHRVEITEGILADECAALLCYFFRMP
RQVFNAQKKAQSSTDGKATAKYFFYSNIMNFFKTEITLANGEIRKRPLIE
TNGETGEIVWDKGRDFATVRKVLSMPQVNIVKKTEVQTGGFSKESILPKR
NSDKLIARKKDWDPKKYGGFDSPTVAYSVLVVAKVEKGKSKKLKSVKELL
GITIMERSSFEKNPIDFLEAKGYKEVKKDLIIKLPKYSLFELENGRKRML
ASAGELQKGNELALPSKYVNFLYLASHYEKLKGSPEDNEQKQLFVEQHKH
YLDEIIEQISEFSKRVILADANLDKVLSAYNKHRDKPIREQAENIIHLFT
LTNLGAPAAFKYFDTTIDRKRYTSTKEVLDATLIHQSITGLYETRIDLSQ
LGGD
103 Cas9 TadAins 1040
MDKKYSIGLAIGTNSVGWAVITDEYKVPSKKFKVLGNTDRHSIKKNLIGA
LLFDSGETAEATRLKRTARRRYTRRKNRICYLQEIFSNEMAKVDDSFFHR
LEESFLVEEDKKHERHPIFGNIVDEVAYHEKYPTIYHLRKKLVDSTDKAD
LRLIYLALAHMIKFRGHFLIEGDLNPDNSDVDKLFIQLVQTYNQLFEENP
INASGVDAKAILSARLSKSRRLENLIAQLPGEKKNGLFGNLIALSLGLTP
NFKSNFDLAEDAKLQLSKDTYDDDLDNLLAQIGDQYADLFLAAKNLSDAI
LLSDILRVNTEITKAPLSASMIKRYDEHHQDLTLLKALVRQQLPEKYKEI
FFDQSKNGYAGYIDGGASQEEFYKFIKPILEKMDGTEELLVKLNREDLLR
KQRTFDNGSIPHQIHLGELHAILRRQEDFYPFLKDNREKIEKILTFRIPY
YVGPLARGNSRFAWMTRKSEETITPWNFEEVVDKGASAQSFIERMTNFDK
NLPNEKVLPKHSLLYEYFTVYNELTKVKYVTEGMRKPAFLSGEQKKAIVD
LLFKTNRKVTVKQLKEDYFKKIECFDSVEISGVEDRFNASLGTYHDLLKI
IKDKDFLDNEENEDILEDIVLTLTLFEDREMIEERLKTYAHLFDDKVMKQ
LKRRRYTGWGRLSRKLINGIRDKQSGKTILDFLKSDGFANRNFMQLIHDD
SLTFKEDIQKAQVSGQGDSLHEHIANLAGSPAIKKGILQTVKVVDELVKV
MGRHKPENIVIEMARENQTTQKGQKNSRERMKRIEEGIKELGSQILKEHP
VENTQLQNEKLYLYYLQNGRDMYVDQELDINRLSDYDVDHIVPQSFLKDD
SIDNKVLTRSDKNRGKSDNVPSEEVVKKMKNYWRQLLNAKLITQRKFDNL
TKAERGGLSELDKAGFIKRQLVETRQITKHVAQILDSRMNTKYDENDKLI
REVKVITLKSKLVSDFRKDFQFYKVREINNYHHAHDAYLNAVVGTALIKK
YPKLESEFVYGDYKVYDVRKMIAKSEQEIGKATAKYFFYSGSSGSETPGT
SESATPESSGSEVEFSHEYWMRHALTLAKRARDEREVPVGAVLVLNNRVI
GEGWNRAIGLHDPTAHAEIMALRQGGLVMQNYRLIDATLYVTFEPCVMCA
GAMIHSRIGRVVFGVRNAKTGAAGSLMDVLHYPGMNHRVEITEGILADEC
AALLCYFFRMPRQVFNAQKKAQSSTDNIMNFFKTEITLANGEIRKRPLIE
TNGETGEIVWDKGRDFATVRKVLSMPQVNIVKKTEVQTGGFSKESILPKR
NSDKLIARKKDWDPKKYGGFDSPTVAYSVLVVAKVEKGKSKKLKSVKELL
GITIMERSSFEKNPIDFLEAKGYKEVKKDLIIKLPKYSLFELENGRKRML
ASAGELQKGNELALPSKYVNFLYLASHYEKLKGSPEDNEQKQLFVEQHKH
YLDEIIEQISEFSKRVILADANLDKVLSAYNKHRDKPIREQAENIIHLFT
LTNLGAPAAFKYFDTTIDRKRYTSTKEVLDATLIHQSITGLYETRIDLSQ
LGGD
105 Cas9 TadAins 1068
MDKKYSIGLAIGTNSVGWAVITDEYKVPSKKFKVLGNTDRHSIKKNLIGA
LLFDSGETAEATRLKRTARRRYTRRKNRICYLQEIFSNEMAKVDDSFFHR
LEESFLVEEDKKHERHPIFGNIVDEVAYHEKYPTIYHLRKKLVDSTDKAD
LRLIYLALAHMIKFRGHFLIEGDLNPDNSDVDKLFIQLVQTYNQLFEENP
INASGVDAKAILSARLSKSRRLENLIAQLPGEKKNGLFGNLIALSLGLTP
NFKSNFDLAEDAKLQLSKDTYDDDLDNLLAQIGDQYADLFLAAKNLSDAI
LLSDILRVNTEITKAPLSASMIKRYDEHHQDLTLLKALVRQQLPEKYKEI
FFDQSKNGYAGYIDGGASQEEFYKFIKPILEKMDGTEELLVKLNREDLLR
KQRTFDNGSIPHQIHLGELHAILRRQEDFYPFLKDNREKIEKILTFRIPY
YVGPLARGNSRFAWMTRKSEETITPWNFEEVVDKGASAQSFIERMTNFDK
NLPNEKVLPKHSLLYEYFTVYNELTKVKYVTEGMRKPAFLSGEQKKAIVD
LLFKTNRKVTVKQLKEDYFKKIECFDSVEISGVEDRFNASLGTYHDLLKI
IKDKDFLDNEENEDILEDIVLTLTLFEDREMIEERLKTYAHLFDDKVMKQ
LKRRRYTGWGRLSRKLINGIRDKQSGKTILDFLKSDGFANRNFMQLIHDD
SLTFKEDIQKAQVSGQGDSLHEHIANLAGSPAIKKGILQTVKVVDELVKV
MGRHKPENIVIEMARENQTTQKGQKNSRERMKRIEEGIKELGSQILKEHP
VENTQLQNEKLYLYYLQNGRDMYVDQELDINRLSDYDVDHIVPQSFLKDD
SIDNKVLTRSDKNRGKSDNVPSEEVVKKMKNYWRQLLNAKLITQRKFDNL
TKAERGGLSELDKAGFIKRQLVETRQITKHVAQILDSRMNTKYDENDKLI
REVKVITLKSKLVSDFRKDFQFYKVREINNYHHAHDAYLNAVVGTALIKK
YPKLESEFVYGDYKVYDVRKMIAKSEQEIGKATAKYFFYSNIMNFFKTEI
TLANGEIRKRPLIETNGEGSSGSETPGTSESATPESSGSEVEFSHEYWMR
HALTLAKRARDEREVPVGAVLVLNNRVIGEGWNRAIGLHDPTAHAEIMAL
RQGGLVMQNYRLIDATLYVTFEPCVMCAGAMIHSRIGRVVFGVRNAKTGA
AGSLMDVLHYPGMNHRVEITEGILADECAALLCYFFRMPRQVFNAQKKAQ
SSTDTGEIVWDKGRDFATVRKVLSMPQVNIVKKTEVQTGGFSKESILPKR
NSDKLIARKKDWDPKKYGGFDSPTVAYSVLVVAKVEKGKSKKLKSVKELL
GITIMERSSFEKNPIDFLEAKGYKEVKKDLIIKLPKYSLFELENGRKRML
ASAGELQKGNELALPSKYVNFLYLASHYEKLKGSPEDNEQKQLFVEQHKH
YLDEIIEQISEFSKRVILADANLDKVLSAYNKHRDKPIREQAENIIHLFT
LTNLGAPAAFKYFDTTIDRKRYTSTKEVLDATLIHQSITGLYETRIDLSQ
LGGD
106 Cas9 TadAins 1247
MDKKYSIGLAIGTNSVGWAVITDEYKVPSKKFKVLGNTDRHSIKKNLIGA
LLFDSGETAEATRLKRTARRRYTRRKNRICYLQEIFSNEMAKVDDSFFHR
LEESFLVEEDKKHERHPIFGNIVDEVAYHEKYPTIYHLRKKLVDSTDKAD
LRLIYLALAHMIKFRGHFLIEGDLNPDNSDVDKLFIQLVQTYNQLFEENP
INASGVDAKAILSARLSKSRRLENLIAQLPGEKKNGLFGNLIALSLGLTP
NFKSNFDLAEDAKLQLSKDTYDDDLDNLLAQIGDQYADLFLAAKNLSDAI
LLSDILRVNTEITKAPLSASMIKRYDEHHQDLTLLKALVRQQLPEKYKEI
FFDQSKNGYAGYIDGGASQEEFYKFIKPILEKMDGTEELLVKLNREDLLR
KQRTFDNGSIPHQIHLGELHAILRRQEDFYPFLKDNREKIEKILTFRIPY
YVGPLARGNSRFAWMTRKSEETITPWNFEEVVDKGASAQSFIERMTNFDK
NLPNEKVLPKHSLLYEYFTVYNELTKVKYVTEGMRKPAFLSGEQKKAIVD
LLFKTNRKVTVKQLKEDYFKKIECFDSVEISGVEDRFNASLGTYHDLLKI
IKDKDFLDNEENEDILEDIVLTLTLFEDREMIEERLKTYAHLFDDKVMKQ
LKRRRYTGWGRLSRKLINGIRDKQSGKTILDFLKSDGFANRNFMQLIHDD
SLTFKEDIQKAQVSGQGDSLHEHIANLAGSPAIKKGILQTVKVVDELVKV
MGRHKPENIVIEMARENQTTQKGQKNSRERMKRIEEGIKELGSQILKEHP
VENTQLQNEKLYLYYLQNGRDMYVDQELDINRLSDYDVDHIVPQSFLKDD
SIDNKVLTRSDKNRGKSDNVPSEEVVKKMKNYWRQLLNAKLITQRKFDNL
TKAERGGLSELDKAGFIKRQLVETRQITKHVAQILDSRMNTKYDENDKLI
REVKVITLKSKLVSDFRKDFQFYKVREINNYHHAHDAYLNAVVGTALIKK
YPKLESEFVYGDYKVYDVRKMIAKSEQEIGKATAKYFFYSNIMNFFKTEI
TLANGEIRKRPLIETNGETGEIVWDKGRDFATVRKVLSMPQVNIVKKTEV
QTGGFSKESILPKRNSDKLIARKKDWDPKKYGGFDSPTVAYSVLVVAKVE
KGKSKKLKSVKELLGITIMERSSFEKNPIDFLEAKGYKEVKKDLIIKLPK
YSLFELENGRKRMLASAGELQKGNELALPSKYVNFLYLASHYEKLKGGSS
GSETPGTSESATPESSGSEVEFSHEYWMRHALTLAKRARDEREVPVGAVL
VLNNRVIGEGWNRAIGLHDPTAHAEIMALRQGGLVMQNYRLIDATLYVTF
EPCVMCAGAMIHSRIGRVVFGVRNAKTGAAGSLMDVLHYPGMNHRVEITE
GILADECAALLCYFFRMPRQVFNAQKKAQSSTDSPEDNEQKQLFVEQHKH
YLDEIIEQISEFSKRVILADANLDKVLSAYNKHRDKPIREQAENIIHLFT
LTNLGAPAAFKYFDTTIDRKRYTSTKEVLDATLIHQSITGLYETRIDLSQ
LGGD
107 Cas9 TadAins 1054
MDKKYSIGLAIGTNSVGWAVITDEYKVPSKKFKVLGNTDRHSIKKNLIGA
LLFDSGETAEATRLKRTARRRYTRRKNRICYLQEIFSNEMAKVDDSFFHR
LEESFLVEEDKKHERHPIFGNIVDEVAYHEKYPTIYHLRKKLVDSTDKAD
LRLIYLALAHMIKFRGHFLIEGDLNPDNSDVDKLFIQLVQTYNQLFEENP
INASGVDAKAILSARLSKSRRLENLIAQLPGEKKNGLFGNLIALSLGLTP
NFKSNFDLAEDAKLQLSKDTYDDDLDNLLAQIGDQYADLFLAAKNLSDAI
LLSDILRVNTEITKAPLSASMIKRYDEHHQDLTLLKALVRQQLPEKYKEI
FFDQSKNGYAGYIDGGASQEEFYKFIKPILEKMDGTEELLVKLNREDLLR
KQRTFDNGSIPHQIHLGELHAILRRQEDFYPFLKDNREKIEKILTFRIPY
YVGPLARGNSRFAWMTRKSEETITPWNFEEVVDKGASAQSFIERMTNFDK
NLPNEKVLPKHSLLYEYFTVYNELTKVKYVTEGMRKPAFLSGEQKKAIVD
LLFKTNRKVTVKQLKEDYFKKIECFDSVEISGVEDRFNASLGTYHDLLKI
IKDKDFLDNEENEDILEDIVLTLTLFEDREMIEERLKTYAHLFDDKVMKQ
LKRRRYTGWGRLSRKLINGIRDKQSGKTILDFLKSDGFANRNFMQLIHDD
SLTFKEDIQKAQVSGQGDSLHEHIANLAGSPAIKKGILQTVKVVDELVKV
MGRHKPENIVIEMARENQTTQKGQKNSRERMKRIEEGIKELGSQILKEHP
VENTQLQNEKLYLYYLQNGRDMYVDQELDINRLSDYDVDHIVPQSFLKDD
SIDNKVLTRSDKNRGKSDNVPSEEVVKKMKNYWRQLLNAKLITQRKFDNL
TKAERGGLSELDKAGFIKRQLVETRQITKHVAQILDSRMNTKYDENDKLI
REVKVITLKSKLVSDFRKDFQFYKVREINNYHHAHDAYLNAVVGTALIKK
YPKLESEFVYGDYKVYDVRKMIAKSEQEIGKATAKYFFYSNIMNFFKTEI
TLANGSSGSETPGTSESATPESSGSEVEFSHEYWMRHALTLAKRARDERE
VPVGAVLVLNNRVIGEGWNRAIGLHDPTAHAEIMALRQGGLVMQNYRLID
ATLYVTFEPCVMCAGAMIHSRIGRVVFGVRNAKTGAAGSLMDVLHYPGMN
HRVEITEGILADECAALLCYFFRMPRQVFNAQKKAQSSTDGEIRKRPLIE
TNGETGEIVWDKGRDFATVRKVLSMPQVNIVKKTEVQTGGFSKESILPKR
NSDKLIARKKDWDPKKYGGFDSPTVAYSVLVVAKVEKGKSKKLKSVKELL
GITIMERSSFEKNPIDFLEAKGYKEVKKDLIIKLPKYSLFELENGRKRML
ASAGELQKGNELALPSKYVNFLYLASHYEKLKGSPEDNEQKQLFVEQHKH
YLDEIIEQISEFSKRVILADANLDKVLSAYNKHRDKPIREQAENIIHLFT
LTNLGAPAAFKYFDTTIDRKRYTSTKEVLDATLIHQSITGLYETRIDLSQ
LGGD
108 Cas9 TadAins 1026
MDKKYSIGLAIGTNSVGWAVITDEYKVPSKKFKVLGNTDRHSIKKNLIGA
LLFDSGETAEATRLKRTARRRYTRRKNRICYLQEIFSNEMAKVDDSFFHR
LEESFLVEEDKKHERHPIFGNIVDEVAYHEKYPTIYHLRKKLVDSTDKAD
LRLIYLALAHMIKFRGHFLIEGDLNPDNSDVDKLFIQLVQTYNQLFEENP
INASGVDAKAILSARLSKSRRLENLIAQLPGEKKNGLFGNLIALSLGLTP
NFKSNFDLAEDAKLQLSKDTYDDDLDNLLAQIGDQYADLFLAAKNLSDAI
LLSDILRVNTEITKAPLSASMIKRYDEHHQDLTLLKALVRQQLPEKYKEI
FFDQSKNGYAGYIDGGASQEEFYKFIKPILEKMDGTEELLVKLNREDLLR
KQRTFDNGSIPHQIHLGELHAILRRQEDFYPFLKDNREKIEKILTFRIPY
YVGPLARGNSRFAWMTRKSEETITPWNFEEVVDKGASAQSFIERMTNFDK
NLPNEKVLPKHSLLYEYFTVYNELTKVKYVTEGMRKPAFLSGEQKKAIVD
LLFKTNRKVTVKQLKEDYFKKIECFDSVEISGVEDRFNASLGTYHDLLKI
IKDKDFLDNEENEDILEDIVLTLTLFEDREMIEERLKTYAHLFDDKVMKQ
LKRRRYTGWGRLSRKLINGIRDKQSGKTILDFLKSDGFANRNFMQLIHDD
SLTFKEDIQKAQVSGQGDSLHEHIANLAGSPAIKKGILQTVKVVDELVKV
MGRHKPENIVIEMARENQTTQKGQKNSRERMKRIEEGIKELGSQILKEHP
VENTQLQNEKLYLYYLQNGRDMYVDQELDINRLSDYDVDHIVPQSFLKDD
SIDNKVLTRSDKNRGKSDNVPSEEVVKKMKNYWRQLLNAKLITQRKFDNL
TKAERGGLSELDKAGFIKRQLVETRQITKHVAQILDSRMNTKYDENDKLI
REVKVITLKSKLVSDFRKDFQFYKVREINNYHHAHDAYLNAVVGTALIKK
YPKLESEFVYGDYKVYDVRKMIAKSEGSSGSETPGTSESATPESSGSEVE
FSHEYWMRHALTLAKRARDEREVPVGAVLVLNNRVIGEGWNRAIGLHDPT
AHAEIMALRQGGLVMQNYRLIDATLYVTFEPCVMCAGAMIHSRIGRVVFG
VRNAKTGAAGSLMDVLHYPGMNHRVEITEGILADECAALLCYFFRMPRQV
FNAQKKAQSSTDQEIGKATAKYFFYSNIMNFFKTEITLANGEIRKRPLIE
TNGETGEIVWDKGRDFATVRKVLSMPQVNIVKKTEVQTGGFSKESILPKR
NSDKLIARKKDWDPKKYGGFDSPTVAYSVLVVAKVEKGKSKKLKSVKELL
GITIMERSSFEKNPIDFLEAKGYKEVKKDLIIKLPKYSLFELENGRKRML
ASAGELQKGNELALPSKYVNFLYLASHYEKLKGSPEDNEQKQLFVEQHKH
YLDEIIEQISEFSKRVILADANLDKVLSAYNKHRDKPIREQAENIIHLFT
LTNLGAPAAFKYFDTTIDRKRYTSTKEVLDATLIHQSITGLYETRIDLSQ
LGGD
109 Cas9 TadAins 768
MDKKYSIGLAIGTNSVGWAVITDEYKVPSKKFKVLGNTDRHSIKKNLIGA
LLFDSGETAEATRLKRTARRRYTRRKNRICYLQEIFSNEMAKVDDSFFHR
LEESFLVEEDKKHERHPIFGNIVDEVAYHEKYPTIYHLRKKLVDSTDKAD
LRLIYLALAHMIKFRGHFLIEGDLNPDNSDVDKLFIQLVQTYNQLFEENP
INASGVDAKAILSARLSKSRRLENLIAQLPGEKKNGLFGNLIALSLGLTP
NFKSNFDLAEDAKLQLSKDTYDDDLDNLLAQIGDQYADLFLAAKNLSDAI
LLSDILRVNTEITKAPLSASMIKRYDEHHQDLTLLKALVRQQLPEKYKEI
FFDQSKNGYAGYIDGGASQEEFYKFIKPILEKMDGTEELLVKLNREDLLR
KQRTFDNGSIPHQIHLGELHAILRRQEDFYPFLKDNREKIEKILTFRIPY
YVGPLARGNSRFAWMTRKSEETITPWNFEEVVDKGASAQSFIERMTNFDK
NLPNEKVLPKHSLLYEYFTVYNELTKVKYVTEGMRKPAFLSGEQKKAIVD
LLFKTNRKVTVKQLKEDYFKKIECFDSVEISGVEDRFNASLGTYHDLLKI
IKDKDFLDNEENEDILEDIVLTLTLFEDREMIEERLKTYAHLFDDKVMKQ
LKRRRYTGWGRLSRKLINGIRDKQSGKTILDFLKSDGFANRNFMQLIHDD
SLTFKEDIQKAQVSGQGDSLHEHIANLAGSPAIKKGILQTVKVVDELVKV
MGRHKPENIVIEMARENQGSSGSETPGTSESATPESSGSEVEFSHEYWMR
HALTLAKRARDEREVPVGAVLVLNNRVIGEGWNRAIGLHDPTAHAEIMAL
RQGGLVMQNYRLIDATLYVTFEPCVMCAGAMIHSRIGRVVFGVRNAKTGA
AGSLMDVLHYPGMNHRVEITEGILADECAALLCYFFRMPRTTQKGQKNSR
ERMKRIEEGIKELGSQILKEHPVENTQLQNEKLYLYYLQNGRDMYVDQEL
DINRLSDYDVDHIVPQSFLKDDSIDNKVLTRSDKNRGKSDNVPSEEVVKK
MKNYWRQLLNAKLITQRKFDNLTKAERGGLSELDKAGFIKRQLVETRQIT
KHVAQILDSRMNTKYDENDKLIREVKVITLKSKLVSDFRKDFQFYKVREI
NNYHHAHDAYLNAVVGTALIKKYPKLESEFVYGDYKVYDVRKMIAKSEQE
IGKATAKYFFYSNIMNFFKTEITLANGEIRKRPLIETNGETGEIVWDKGR
DFATVRKVLSMPQVNIVKKTEVQTGGFSKESILPKRNSDKLIARKKDWDP
KKYGGFDSPTVAYSVLVVAKVEKGKSKKLKSVKELLGITIMERSSFEKNP
IDFLEAKGYKEVKKDLIIKLPKYSLFELENGRKRMLASAGELQKGNELAL
PSKYVNFLYLASHYEKLKGSPEDNEQKQLFVEQHKHYLDEIIEQISEFSK
RVILADANLDKVLSAYNKHRDKPIREQAENIIHLFTLTNLGAPAAFKYFD
TTIDRKRYTSTKEVLDATLIHQSITGLYETRIDLSQLGGD
110.1 Cas9 TadAins 1250
MDKKYSIGLAIGTNSVGWAVITDEYKVPSKKFKVLGNTDRHSIKKNLIGA
LLFDSGETAEATRLKRTARRRYTRRKNRICYLQEIFSNEMAKVDDSFFHR
LEESFLVEEDKKHERHPIFGNIVDEVAYHEKYPTIYHLRKKLVDSTDKAD
LRLIYLALAHMIKFRGHFLIEGDLNPDNSDVDKLFIQLVQTYNQLFEENP
INASGVDAKAILSARLSKSRRLENLIAQLPGEKKNGLFGNLIALSLGLTP
NFKSNFDLAEDAKLQLSKDTYDDDLDNLLAQIGDQYADLFLAAKNLSDAI
LLSDILRVNTEITKAPLSASMIKRYDEHHQDLTLLKALVRQQLPEKYKEI
FFDQSKNGYAGYIDGGASQEEFYKFIKPILEKMDGTEELLVKLNREDLLR
KQRTFDNGSIPHQIHLGELHAILRRQEDFYPFLKDNREKIEKILTFRIPY
YVGPLARGNSRFAWMTRKSEETITPWNFEEVVDKGASAQSFIERMTNFDK
NLPNEKVLPKHSLLYEYFTVYNELTKVKYVTEGMRKPAFLSGEQKKAIVD
LLFKTNRKVTVKQLKEDYFKKIECFDSVEISGVEDRFNASLGTYHDLLKI
IKDKDFLDNEENEDILEDIVLTLTLFEDREMIEERLKTYAHLFDDKVMKQ
LKRRRYTGWGRLSRKLINGIRDKQSGKTILDFLKSDGFANRNFMQLIHDD
SLTFKEDIQKAQVSGQGDSLHEHIANLAGSPAIKKGILQTVKVVDELVKV
MGRHKPENIVIEMARENQTTQKGQKNSRERMKRIEEGIKELGSQILKEHP
VENTQLQNEKLYLYYLQNGRDMYVDQELDINRLSDYDVDHIVPQSFLKDD
SIDNKVLTRSDKNRGKSDNVPSEEVVKKMKNYWRQLLNAKLITQRKFDNL
TKAERGGLSELDKAGFIKRQLVETRQITKHVAQILDSRMNTKYDENDKLI
REVKVITLKSKLVSDFRKDFQFYKVREINNYHHAHDAYLNAVVGTALIKK
YPKLESEFVYGDYKVYDVRKMIAKSEQEIGKATAKYFFYSNIMNFFKTEI
TLANGEIRKRPLIETNGETGEIVWDKGRDFATVRKVLSMPQVNIVKKTEV
QTGGFSKESILPKRNSDKLIARKKDWDPKKYGGFDSPTVAYSVLVVAKVE
KGKSKKLKSVKELLGITIMERSSFEKNPIDFLEAKGYKEVKKDLIIKLPK
YSLFELENGRKRMLASAGELQKGNELALPSKYVNFLYLASHYEKLKGSPG
SSGSETPGTSESATPESSGSEVEFSHEYWMRHALTLAKRARDEREVPVGA
VLVLNNRVIGEGWNRAIGLHDPTAHAEIMALRQGGLVMQNYRLIDATLYV
TFEPCVMCAGAMIHSRIGRVVFGVRNAKTGAAGSLMDVLHYPGMNHRVEI
TEGILADECAALLCYFFRMPREDNEQKQLFVEQHKHYLDEIIEQISEFSK
RVILADANLDKVLSAYNKHRDKPIREQAENIIHLFTLTNLGAPAAFKYFD
TTIDRKRYTSTKEVLDATLIHQSITGLYETRIDLSQLGGD
110.2 Cas9 TadAins 1250
MDKKYSIGLAIGTNSVGWAVITDEYKVPSKKFKVLGNTDRHSIKKNLIGA
LLFDSGETAEATRLKRTARRRYTRRKNRICYLQEIFSNEMAKVDDSFFHR
LEESFLVEEDKKHERHPIFGNIVDEVAYHEKYPTIYHLRKKLVDSTDKAD
LRLIYLALAHMIKFRGHFLIEGDLNPDNSDVDKLFIQLVQTYNQLFEENP
INASGVDAKAILSARLSKSRRLENLIAQLPGEKKNGLFGNLIALSLGLTP
NFKSNFDLAEDAKLQLSKDTYDDDLDNLLAQIGDQYADLFLAAKNLSDAI
LLSDILRVNTEITKAPLSASMIKRYDEHHQDLTLLKALVRQQLPEKYKEI
FFDQSKNGYAGYIDGGASQEEFYKFIKPILEKMDGTEELLVKLNREDLLR
KQRTFDNGSIPHQIHLGELHAILRRQEDFYPFLKDNREKIEKILTFRIPY
YVGPLARGNSRFAWMTRKSEETITPWNFEEVVDKGASAQSFIERMTNFDK
NLPNEKVLPKHSLLYEYFTVYNELTKVKYVTEGMRKPAFLSGEQKKAIVD
LLFKTNRKVTVKQLKEDYFKKIECFDSVEISGVEDRFNASLGTYHDLLKI
IKDKDFLDNEENEDILEDIVLTLTLFEDREMIEERLKTYAHLFDDKVMKQ
LKRRRYTGWGRLSRKLINGIRDKQSGKTILDFLKSDGFANRNFMQLIHDD
SLTFKEDIQKAQVSGQGDSLHEHIANLAGSPAIKKGILQTVKVVDELVKV
MGRHKPENIVIEMARENQTTQKGQKNSRERMKRIEEGIKELGSQILKEHP
VENTQLQNEKLYLYYLQNGRDMYVDQELDINRLSDYDVDHIVPQSFLKDD
SIDNKVLTRSDKNRGKSDNVPSEEVVKKMKNYWRQLLNAKLITQRKFDNL
TKAERGGLSELDKAGFIKRQLVETRQITKHVAQILDSRMNTKYDENDKLI
REVKVITLKSKLVSDFRKDFQFYKVREINNYHHAHDAYLNAVVGTALIKK
YPKLESEFVYGDYKVYDVRKMIAKSEQEIGKATAKYFFYSNIMNFFKTEI
TLANGEIRKRPLIETNGETGEIVWDKGRDFATVRKVLSMPQVNIVKKTEV
QTGGFSKESILPKRNSDKLIARKKDWDPKKYGGFDSPTVAYSVLVVAKVE
KGKSKKLKSVKELLGITIMERSSFEKNPIDFLEAKGYKEVKKDLIIKLPK
YSLFELENGRKRMLASAGELQKGNELALPSKYVNFLYLASHYEKLKGSPG
SSGSSGSETPGTSESATPESSGSEVEFSHEYWMRHALTLAKRARDEREVP
VGAVLVLNNRVIGEGWNRAIGLHDPTAHAEIMALRQGGLVMQNYRLIDAT
LYVTFEPCVMCAGAMIHSRIGRVVFGVRNAKTGAAGSLMDVLHYPGMNHR
VEITEGILADECAALLCYFFRMPREDNEQKQLFVEQHKHYLDEIIEQISE
FSKRVILADANLDKVLSAYNKHRDKPIREQAENIIHLFTLTNLGAPAAFK
YFDTTIDRKRYTSTKEVLDATLIHQSITGLYETRIDLSQLGGD
110.3 Cas9 TadAins 1250
MDKKYSIGLAIGTNSVGWAVITDEYKVPSKKFKVLGNTDRHSIKKNLIGA
LLFDSGETAEATRLKRTARRRYTRRKNRICYLQEIFSNEMAKVDDSFFHR
LEESFLVEEDKKHERHPIFGNIVDEVAYHEKYPTIYHLRKKLVDSTDKAD
LRLIYLALAHMIKFRGHFLIEGDLNPDNSDVDKLFIQLVQTYNQLFEENP
INASGVDAKAILSARLSKSRRLENLIAQLPGEKKNGLFGNLIALSLGLTP
NFKSNFDLAEDAKLQLSKDTYDDDLDNLLAQIGDQYADLFLAAKNLSDAI
LLSDILRVNTEITKAPLSASMIKRYDEHHQDLTLLKALVRQQLPEKYKEI
FFDQSKNGYAGYIDGGASQEEFYKFIKPILEKMDGTEELLVKLNREDLLR
KQRTFDNGSIPHQIHLGELHAILRRQEDFYPFLKDNREKIEKILTFRIPY
YVGPLARGNSRFAWMTRKSEETITPWNFEEVVDKGASAQSFIERMTNFDK
NLPNEKVLPKHSLLYEYFTVYNELTKVKYVTEGMRKPAFLSGEQKKAIVD
LLFKTNRKVTVKQLKEDYFKKIECFDSVEISGVEDRFNASLGTYHDLLKI
IKDKDFLDNEENEDILEDIVLTLTLFEDREMIEERLKTYAHLFDDKVMKQ
LKRRRYTGWGRLSRKLINGIRDKQSGKTILDFLKSDGFANRNFMQLIHDD
SLTFKEDIQKAQVSGQGDSLHEHIANLAGSPAIKKGILQTVKVVDELVKV
MGRHKPENIVIEMARENQTTQKGQKNSRERMKRIEEGIKELGSQILKEHP
VENTQLQNEKLYLYYLQNGRDMYVDQELDINRLSDYDVDHIVPQSFLKDD
SIDNKVLTRSDKNRGKSDNVPSEEVVKKMKNYWRQLLNAKLITQRKFDNL
TKAERGGLSELDKAGFIKRQLVETRQITKHVAQILDSRMNTKYDENDKLI
REVKVITLKSKLVSDFRKDFQFYKVREINNYHHAHDAYLNAVVGTALIKK
YPKLESEFVYGDYKVYDVRKMIAKSEQEIGKATAKYFFYSNIMNFFKTEI
TLANGEIRKRPLIETNGETGEIVWDKGRDFATVRKVLSMPQVNIVKKTEV
QTGGFSKESILPKRNSDKLIARKKDWDPKKYGGFDSPTVAYSVLVVAKVE
KGKSKKLKSVKELLGITIMERSSFEKNPIDFLEAKGYKEVKKDLIIKLPK
YSLFELENGRKRMLASAGELQKGNELALPSKYVNFLYLASHYEKLKGSPG
SSGSSGSETPGTSESATPESGSSSGSEVEFSHEYWMRHALTLAKRARDER
EVPVGAVLVLNNRVIGEGWNRAIGLHDPTAHAEIMALRQGGLVMQNYRLI
DATLYVTFEPCVMCAGAMIHSRIGRVVFGVRNAKTGAAGSLMDVLHYPGM
NHRVEITEGILADECAALLCYFFRMPREDNEQKQLFVEQHKHYLDEIIEQ
ISEFSKRVILADANLDKVLSAYNKHRDKPIREQAENIIHLFTLTNLGAPA
AFKYFDTTIDRKRYTSTKEVLDATLIHQSITGLYETRIDLSQLGGD
110.4 Cas9 TadAins 1250
MDKKYSIGLAIGTNSVGWAVITDEYKVPSKKFKVLGNTDRHSIKKNLIGA
LLFDSGETAEATRLKRTARRRYTRRKNRICYLQEIFSNEMAKVDDSFFHR
LEESFLVEEDKKHERHPIFGNIVDEVAYHEKYPTIYHLRKKLVDSTDKAD
LRLIYLALAHMIKFRGHFLIEGDLNPDNSDVDKLFIQLVQTYNQLFEENP
INASGVDAKAILSARLSKSRRLENLIAQLPGEKKNGLFGNLIALSLGLTP
NFKSNFDLAEDAKLQLSKDTYDDDLDNLLAQIGDQYADLFLAAKNLSDAI
LLSDILRVNTEITKAPLSASMIKRYDEHHQDLTLLKALVRQQLPEKYKEI
FFDQSKNGYAGYIDGGASQEEFYKFIKPILEKMDGTEELLVKLNREDLLR
KQRTFDNGSIPHQIHLGELHAILRRQEDFYPFLKDNREKIEKILTFRIPY
YVGPLARGNSRFAWMTRKSEETITPWNFEEVVDKGASAQSFIERMTNFDK
NLPNEKVLPKHSLLYEYFTVYNELTKVKYVTEGMRKPAFLSGEQKKAIVD
LLFKTNRKVTVKQLKEDYFKKIECFDSVEISGVEDRFNASLGTYHDLLKI
IKDKDFLDNEENEDILEDIV+32TLFEDREMIEERLKTYAHLFDDKVMKQ
LKRRRYTGWGRLSRKLINGIRDKQSGKTILDFLKSDGFANRNFMQLIHDD
SLTFKEDIQKAQVSGQGDSLHEHIANLAGSPAIKKGILQTVKVVDELVKV
MGRHKPENIVIEMARENQTTQKGQKNSRERMKRIEEGIKELGSQILKEHP
VENTQLQNEKLYLYYLQNGRDMYVDQELDINRLSDYDVDHIVPQSFLKDD
SIDNKVLTRSDKNRGKSDNVPSEEVVKKMKNYWRQLLNAKLITQRKFDNL
TKAERGGLSELDKAGFIKRQLVETRQITKHVAQILDSRMNTKYDENDKLI
REVKVITLKSKLVSDFRKDFQFYKVREINNYHHAHDAYLNAVVGTALIKK
YPKLESEFVYGDYKVYDVRKMIAKSEQEIGKATAKYFFYSNIMNFFKTEI
TLANGEIRKRPLIETNGETGEIVWDKGRDFATVRKVLSMPQVNIVKKTEV
QTGGFSKESILPKRNSDKLIARKKDWDPKKYGGFDSPTVAYSVLVVAKVE
KGKSKKLKSVKELLGITIMERSSFEKNPIDFLEAKGYKEVKKDLIIKLPK
YSLFELENGRKRMLASAGELQKGNELALPSKYVNFLYLASHYEKLKGSPG
SSGSSGSETPGTSESATPESGSSSGSEVEFSHEYWMRHALTLAKRARDER
EVPVGAVLVLNNRVIGEGWNRAIGLHDPTAHAEIMALRQGGLVMQNYRLI
DATLYVTFEPCVMCAGAMIHSRIGRVVFGVRNAKTGAAGSLMDVLHYPGM
NHRVEITEGILADECAALLCYFFRMRREDNEQKQLFVEQHKHYLDEIIEQ
ISEFSKRVILADANLDKVLSAYNKHRDKPIREQAENIIHLFTLTNLGAPA
AFKYFDTTIDRKRYTSTKEVLDATLIHQSITGLYETRIDLSQLGGD
110.5 Cas9 TadAins 1249
MDKKYSIGLAIGTNSVGWAVITDEYKVPSKKFKVLGNTDRHSIKKNLIGA
LLFDSGETAEATRLKRTARRRYTRRKNRICYLQEIFSNEMAKVDDSFFHR
LEESFLVEEDKKHERHPIFGNIVDEVAYHEKYPTIYHLRKKLVDSTDKAD
LRLIYLALAHMIKFRGHFLIEGDLNPDNSDVDKLFIQLVQTYNQLFEENP
INASGVDAKAILSARLSKSRRLENLIAQLPGEKKNGLFGNLIALSLGLTP
NFKSNFDLAEDAKLQLSKDTYDDDLDNLLAQIGDQYADLFLAAKNLSDAI
LLSDILRVNTEITKAPLSASMIKRYDEHHQDLTLLKALVRQQLPEKYKEI
FFDQSKNGYAGYIDGGASQEEFYKFIKPILEKMDGTEELLVKLNREDLLR
KQRTFDNGSIPHQIHLGELHAILRRQEDFYPFLKDNREKIEKILTFRIPY
YVGPLARGNSRFAWMTRKSEETITPWNFEEVVDKGASAQSFIERMTNFDK
NLPNEKVLPKHSLLYEYFTVYNELTKVKYVTEGMRKPAFLSGEQKKAIVD
LLFKTNRKVTVKQLKEDYFKKIECFDSVEISGVEDRFNASLGTYHDLLKI
IKDKDFLDNEENEDILEDIVLTLTLFEDREMIEERLKTYAHLFDDKVMKQ
LKRRRYTGWGRLSRKLINGIRDKQSGKTILDFLKSDGFANRNFMQLIHDD
SLTFKEDIQKAQVSGQGDSLHEHIANLAGSPAIKKGILQTVKVVDELVKV
MGRHKPENIVIEMARENQTTQKGQKNSRERMKRIEEGIKELGSQILKEHP
VENTQLQNEKLYLYYLQNGRDMYVDQELDINRLSDYDVDHIVPQSFLKDD
SIDNKVLTRSDKNRGKSDNVPSEEVVKKMKNYWRQLLNAKLITQRKFDNL
TKAERGGLSELDKAGFIKRQLVETRQITKHVAQILDSRMNTKYDENDKLI
REVKVITLKSKLVSDFRKDFQFYKVREINNYHHAHDAYLNAVVGTALIKK
YPKLESEFVYGDYKVYDVRKMIAKSEQEIGKATAKYFFYSNIMNFFKTEI
TLANGEIRKRPLIETNGETGEIVWDKGRDFATVRKVLSMPQVNIVKKTEV
QTGGFSKESILPKRNSDKLIARKKDWDPKKYGGFDSPTVAYSVLVVAKVE
KGKSKKLKSVKELLGITIMERSSFEKNPIDFLEAKGYKEVKKDLIIKLPK
YSLFELENGRKRMLASAGELQKGNELALPSKYVNFLYLASHYEKLKGSGS
SGSSGSETPGTSESATPESGSSSGSEVEFSHEYWMRHALTLAKRARDERE
VPVGAVLVLNNRVIGEGWNRAIGLHDPTAHAEIMALRQGGLVMQNYRLID
ATLYVTFEPCVMCAGAMIHSRIGRVVFGVRNAKTGAAGSLMDVLHYPGMN
HRVEITEGILADECAALLCYFFRMRRPEDNEQKQLFVEQHKHYLDEIIEQ
ISEFSKRVILADANLDKVLSAYNKHRDKPIREQAENIIHLFTLTNLGAPA
AFKYFDTTIDRKRYTSTKEVLDATLIHQSITGLYETRIDLSQLGGD
110.5 Cas9 TadAins delta 59-66 1250
MDKKYSIGLAIGTNSVGWAVITDEYKVPSKKFKVLGNTDRHSIKKNLIGA
LLFDSGETAEATRLKRTARRRYTRRKNRICYLQEIFSNEMAKVDDSFFHR
LEESFLVEEDKKHERHPIFGNIVDEVAYHEKYPTIYHLRKKLVDSTDKAD
LRLIYLALAHMIKFRGHFLIEGDLNPDNSDVDKLFIQLVQTYNQLFEENP
INASGVDAKAILSARLSKSRRLENLIAQLPGEKKNGLFGNLIALSLGLTP
NFKSNFDLAEDAKLQLSKDTYDDDLDNLLAQIGDQYADLFLAAKNLSDAI
LLSDILRVNTEITKAPLSASMIKRYDEHHQDLTLLKALVRQQLPEKYKEI
FFDQSKNGYAGYIDGGASQEEFYKFIKPILEKMDGTEELLVKLNREDLLR
KQRTFDNGSIPHQIHLGELHAILRRQEDFYPFLKDNREKIEKILTFRIPY
YVGPLARGNSRFAWMTRKSEETITPWNFEEVVDKGASAQSFIERMTNFDK
NLPNEKVLPKHSLLYEYFTVYNELTKVKYVTEGMRKPAFLSGEQKKAIVD
LLFKTNRKVTVKQLKEDYFKKIECFDSVEISGVEDRFNASLGTYHDLLKI
IKDKDFLDNEENEDILEDIV+32TLFEDREMIEERLKTYAHLFDDKVMKQ
LKRRRYTGWGRLSRKLINGIRDKQSGKTILDFLKSDGFANRNFMQLIHDD
SLTFKEDIQKAQVSGQGDSLHEHIANLAGSPAIKKGILQTVKVVDELVKV
MGRHKPENIVIEMARENQTTQKGQKNSRERMKRIEEGIKELGSQILKEHP
VENTQLQNEKLYLYYLQNGRDMYVDQELDINRLSDYDVDHIVPQSFLKDD
SIDNKVLTRSDKNRGKSDNVPSEEVVKKMKNYWRQLLNAKLITQRKFDNL
TKAERGGLSELDKAGFIKRQLVETRQITKHVAQILDSRMNTKYDENDKLI
REVKVITLKSKLVSDFRKDFQFYKVREINNYHHAHDAYLNAVVGTALIKK
YPKLESEFVYGDYKVYDVRKMIAKSEQEIGKATAKYFFYSNIMNFFKTEI
TLANGEIRKRPLIETNGETGEIVWDKGRDFATVRKVLSMPQVNIVKKTEV
QTGGFSKESILPKRNSDKLIARKKDWDPKKYGGFDSPTVAYSVLVVAKVE
KGKSKKLKSVKELLGITIMERSSFEKNPIDFLEAKGYKEVKKDLIIKLPK
YSLFELENGRKRMLASAGELQKGNELALPSKYVNFLYLASHYEKLKGSPG
SSGSSGSETPGTSESATPESGSSGSEVEFSHEYWMRHALTLAKRARDERE
VPVGAVLVLNNRVIGEGWNRAHAEIMALRQGGLVMQNYRLIDATLYVTFE
PCVMCAGAMIHSRIGRVVFGVRNAKTGAAGSLMDVLHYPGMNHRVEITEG
ILADECAALLCYFFRMPRQVFNAQKKAQSSTDEDNEQKQLFVEQHKHYLD
EIIEQISEFSKRVILADANLDKVLSAYNKHRDKPIREQAENIIHLFTLTN
LGAPAAFKYFDTTIDRKRYTSTKEVLDATLIHQSITGLYETRIDLSQLGG
D
110.6 Cas9 TadAins 1251
MDKKYSIGLAIGTNSVGWAVITDEYKVPSKKFKVLGNTDRHSIKKNLIGA
LLFDSGETAEATRLKRTARRRYTRRKNRICYLQEIFSNEMAKVDDSFFHR
LEESFLVEEDKKHERHPIFGNIVDEVAYHEKYPTIYHLRKKLVDSTDKAD
LRLIYLALAHMIKFRGHFLIEGDLNPDNSDVDKLFIQLVQTYNQLFEENP
INASGVDAKAILSARLSKSRRLENLIAQLPGEKKNGLFGNLIALSLGLTP
NFKSNFDLAEDAKLQLSKDTYDDDLDNLLAQIGDQYADLFLAAKNLSDAI
LLSDILRVNTEITKAPLSASMIKRYDEHHQDLTLLKALVRQQLPEKYKEI
FFDQSKNGYAGYIDGGASQEEFYKFIKPILEKMDGTEELLVKLNREDLLR
KQRTFDNGSIPHQIHLGELHAILRRQEDFYPFLKDNREKIEKILTFRIPY
YVGPLARGNSRFAWMTRKSEETITPWNFEEVVDKGASAQSFIERMTNFDK
NLPNEKVLPKHSLLYEYFTVYNELTKVKYVTEGMRKPAFLSGEQKKAIVD
LLFKTNRKVTVKQLKEDYFKKIECFDSVEISGVEDRFNASLGTYHDLLKI
IKDKDFLDNEENEDILEDIVLTLTLFEDREMIEERLKTYAHLFDDKVMKQ
LKRRRYTGWGRLSRKLINGIRDKQSGKTILDFLKSDGFANRNFMQLIHDD
SLTFKEDIQKAQVSGQGDSLHEHIANLAGSPAIKKGILQTVKVVDELVKV
MGRHKPENIVIEMARENQTTQKGQKNSRERMKRIEEGIKELGSQILKEHP
VENTQLQNEKLYLYYLQNGRDMYVDQELDINRLSDYDVDHIVPQSFLKDD
SIDNKVLTRSDKNRGKSDNVPSEEVVKKMKNYWRQLLNAKLITQRKFDNL
TKAERGGLSELDKAGFIKRQLVETRQITKHVAQILDSRMNTKYDENDKLI
REVKVITLKSKLVSDFRKDFQFYKVREINNYHHAHDAYLNAVVGTALIKK
YPKLESEFVYGDYKVYDVRKMIAKSEQEIGKATAKYFFYSNIMNFFKTEI
TLANGEIRKRPLIETNGETGEIVWDKGRDFATVRKVLSMPQVNIVKKTEV
QTGGFSKESILPKRNSDKLIARKKDWDPKKYGGFDSPTVAYSVLVVAKVE
KGKSKKLKSVKELLGITIMERSSFEKNPIDFLEAKGYKEVKKDLIIKLPK
YSLFELENGRKRMLASAGELQKGNELALPSKYVNFLYLASHYEKLKGSPE
GSSGSSGSETPGTSESATPESGSSSGSEVEFSHEYWMRHALTLAKRARDE
REVPVGAVLVLNNRVIGEGWNRAIGLHDPTAHAEIMALRQGGLVMQNYRL
IDATLYVTFEPCVMCAGAMIHSRIGRVVFGVRNAKTGAAGSLMDVLHYPG
MNHRVEITEGILADECAALLCYFFRMRRDNEQKQLFVEQHKHYLDEIIEQ
ISEFSKRVILADANLDKVLSAYNKHRDKPIREQAENIIHLFTLTNLGAPA
AFKYFDTTIDRKRYTSTKEVLDATLIHQSITGLYETRIDLSQLGGD
110.7 Cas9 TadAins 1252
MDKKYSIGLAIGTNSVGWAVITDEYKVPSKKFKVLGNTDRHSIKKNLIGA
LLFDSGETAEATRLKRTARRRYTRRKNRICYLQEIFSNEMAKVDDSFFHR
LEESFLVEEDKKHERHPIFGNIVDEVAYHEKYPTIYHLRKKLVDSTDKAD
LRLIYLALAHMIKFRGHFLIEGDLNPDNSDVDKLFIQLVQTYNQLFEENP
INASGVDAKAILSARLSKSRRLENLIAQLPGEKKNGLFGNLIALSLGLTP
NFKSNFDLAEDAKLQLSKDTYDDDLDNLLAQIGDQYADLFLAAKNLSDAI
LLSDILRVNTEITKAPLSASMIKRYDEHHQDLTLLKALVRQQLPEKYKEI
FFDQSKNGYAGYIDGGASQEEFYKFIKPILEKMDGTEELLVKLNREDLLR
KQRTFDNGSIPHQIHLGELHAILRRQEDFYPFLKDNREKIEKILTFRIPY
YVGPLARGNSRFAWMTRKSEETITPWNFEEVVDKGASAQSFIERMTNFDK
NLPNEKVLPKHSLLYEYFTVYNELTKVKYVTEGMRKPAFLSGEQKKAIVD
LLFKTNRKVTVKQLKEDYFKKIECFDSVEISGVEDRFNASLGTYHDLLKI
IKDKDFLDNEENEDILEDIVLTLTLFEDREMIEERLKTYAHLFDDKVMKQ
LKRRRYTGWGRLSRKLINGIRDKQSGKTILDFLKSDGFANRNFMQLIHDD
SLTFKEDIQKAQVSGQGDSLHEHIANLAGSPAIKKGILQTVKVVDELVKV
MGRHKPENIVIEMARENQTTQKGQKNSRERMKRIEEGIKELGSQILKEHP
VENTQLQNEKLYLYYLQNGRDMYVDQELDINRLSDYDVDHIVPQSFLKDD
SIDNKVLTRSDKNRGKSDNVPSEEVVKKMKNYWRQLLNAKLITQRKFDNL
TKAERGGLSELDKAGFIKRQLVETRQITKHVAQILDSRMNTKYDENDKLI
REVKVITLKSKLVSDFRKDFQFYKVREINNYHHAHDAYLNAVVGTALIKK
YPKLESEFVYGDYKVYDVRKMIAKSEQEIGKATAKYFFYSNIMNFFKTEI
TLANGEIRKRPLIETNGETGEIVWDKGRDFATVRKVLSMPQVNIVKKTEV
QTGGFSKESILPKRNSDKLIARKKDWDPKKYGGFDSPTVAYSVLVVAKVE
KGKSKKLKSVKELLGITIMERSSFEKNPIDFLEAKGYKEVKKDLIIKLPK
YSLFELENGRKRMLASAGELQKGNELALPSKYVNFLYLASHYEKLKGSPE
DGSSGSSGSETPGTSESATPESGSSSGSEVEFSHEYWMRHALTLAKRARD
EREVPVGAVLVLNNRVIGEGWNRAIGLHDPTAHAEIMALRQGGLVMQNYR
LIDATLYVTFEPCVMCAGAMIHSRIGRVVFGVRNAKTGAAGSLMDVLHYP
GMNHRVEITEGILADECAALLCYFFRMRRNEQKQLFVEQHKHYLDEIIEQ
ISEFSKRVILADANLDKVLSAYNKHRDKPIREQAENIIHLFTLTNLGAPA
AFKYFDTTIDRKRYTSTKEVLDATLIHQSITGLYETRIDLSQLGGD
110.8 Cas9 TadAins delta 59-66 C-truncate 1250
MDKKYSIGLAIGTNSVGWAVITDEYKVPSKKFKVLGNTDRHSIKKNLIGA
LLFDSGETAEATRLKRTARRRYTRRKNRICYLQEIFSNEMAKVDDSFFHR
LEESFLVEEDKKHERHPIFGNIVDEVAYHEKYPTIYHLRKKLVDSTDKAD
LRLIYLALAHMIKFRGHFLIEGDLNPDNSDVDKLFIQLVQTYNQLFEENP
INASGVDAKAILSARLSKSRRLENLIAQLPGEKKNGLFGNLIALSLGLTP
NFKSNFDLAEDAKLQLSKDTYDDDLDNLLAQIGDQYADLFLAAKNLSDAI
LLSDILRVNTEITKAPLSASMIKRYDEHHQDLTLLKALVRQQLPEKYKEI
FFDQSKNGYAGYIDGGASQEEFYKFIKPILEKMDGTEELLVKLNREDLLR
KQRTFDNGSIPHQIHLGELHAILRRQEDFYPFLKDNREKIEKILTFRIPY
YVGPLARGNSRFAWMTRKSEETITPWNFEEVVDKGASAQSFIERMTNFDK
NLPNEKVLPKHSLLYEYFTVYNELTKVKYVTEGMRKPAFLSGEQKKAIVD
LLFKTNRKVTVKQLKEDYFKKIECFDSVEISGVEDRFNASLGTYHDLLKI
IKDKDFLDNEENEDILEDIVLTLTLFEDREMIEERLKTYAHLFDDKVMKQ
LKRRRYTGWGRLSRKLINGIRDKQSGKTILDFLKSDGFANRNFMQLIHDD
SLTFKEDIQKAQVSGQGDSLHEHIANLAGSPAIKKGILQTVKVVDELVKV
MGRHKPENIVIEMARENQTTQKGQKNSRERMKRIEEGIKELGSQILKEHP
VENTQLQNEKLYLYYLQNGRDMYVDQELDINRLSDYDVDHIVPQSFLKDD
SIDNKVLTRSDKNRGKSDNVPSEEVVKKMKNYWRQLLNAKLITQRKFDNL
TKAERGGLSELDKAGFIKRQLVETRQITKHVAQILDSRMNTKYDENDKLI
REVKVITLKSKLVSDFRKDFQFYKVREINNYHHAHDAYLNAVVGTALIKK
YPKLESEFVYGDYKVYDVRKMIAKSEQEIGKATAKYFFYSNIMNFFKTEI
TLANGEIRKRPLIETNGETGEIVWDKGRDFATVRKVLSMPQVNIVKKTEV
QTGGFSKESILPKRNSDKLIARKKDWDPKKYGGFDSPTVAYSVLVVAKVE
KGKSKKLKSVKELLGITIMERSSFEKNPIDFLEAKGYKEVKKDLIIKLPK
YSLFELENGRKRMLASAGELQKGNELALPSKYVNFLYLASHYEKLKGSPG
SSGSETPGTSESATPESSGSEVEFSHEYWMRHALTLAKRARDEREVPVGA
VLVLNNRVIGEGWNRAHAEIMALRQGGLVMQNYRLIDATLYVTFEPCVMC
AGAMIHSRIGRVVFGVRNAKTGAAGSLMDVLHYPGMNHRVEITEGILADE
CAALLCYFFRMPRQEDNEQKQLFVEQHKHYLDEIIEQISEFSKRVILADA
NLDKVLSAYNKHRDKPIREQAENIIHLFTLTNLGAPAAFKYFDTTIDRKR
YTSTKEVLDATLIHQSITGLYETRIDLSQLGGD
111.1 Cas9 TadAins 997
MDKKYSIGLAIGTNSVGWAVITDEYKVPSKKFKVLGNTDRHSIKKNLIGA
LLFDSGETAEATRLKRTARRRYTRRKNRICYLQEIFSNEMAKVDDSFFHR
LEESFLVEEDKKHERHPIFGNIVDEVAYHEKYPTIYHLRKKLVDSTDKAD
LRLIYLALAHMIKFRGHFLIEGDLNPDNSDVDKLFIQLVQTYNQLFEENP
INASGVDAKAILSARLSKSRRLENLIAQLPGEKKNGLFGNLIALSLGLTP
NFKSNFDLAEDAKLQLSKDTYDDDLDNLLAQIGDQYADLFLAAKNLSDAI
LLSDILRVNTEITKAPLSASMIKRYDEHHQDLTLLKALVRQQLPEKYKEI
FFDQSKNGYAGYIDGGASQEEFYKFIKPILEKMDGTEELLVKLNREDLLR
KQRTFDNGSIPHQIHLGELHAILRRQEDFYPFLKDNREKIEKILTFRIPY
YVGPLARGNSRFAWMTRKSEETITPWNFEEVVDKGASAQSFIERMTNFDK
NLPNEKVLPKHSLLYEYFTVYNELTKVKYVTEGMRKPAFLSGEQKKAIVD
LLFKTNRKVTVKQLKEDYFKKIECFDSVEISGVEDRFNASLGTYHDLLKI
IKDKDFLDNEENEDILEDIVLTLTLFEDREMIEERLKTYAHLFDDKVMKQ
LKRRRYTGWGRLSRKLINGIRDKQSGKTILDFLKSDGFANRNFMQLIHDD
SLTFKEDIQKAQVSGQGDSLHEHIANLAGSPAIKKGILQTVKVVDELVKV
MGRHKPENIVIEMARENQTTQKGQKNSRERMKRIEEGIKELGSQILKEHP
VENTQLQNEKLYLYYLQNGRDMYVDQELDINRLSDYDVDHIVPQSFLKDD
SIDNKVLTRSDKNRGKSDNVPSEEVVKKMKNYWRQLLNAKLITQRKFDNL
TKAERGGLSELDKAGFIKRQLVETRQITKHVAQILDSRMNTKYDENDKLI
REVKVITLKSKLVSDFRKDFQFYKVREINNYHHAHDAYLNAVVGTALSHE
YWMRHALTLAKRARDEREVPVGAVLVLNNRVIGEGWNRAIGLHDPTAHAE
IMALRQGGLVMQNYRLIDATLYVTFEPCVMCAGAMIHSRIGRVVFGVRNA
KTGAAGSLMDVLHYPGMNHRVEITEGILADECAALLCYFFRMPRQVFNAQ
KKAQSSTDGSSGSETPGTSESATPESSGIKKYPKLESEFVYGDYKVYDVR
KMIAKSEQEIGKATAKYFFYSNIMNFFKTEITLANGEIRKRPLIETNGET
GEIVWDKGRDFATVRKVLSMPQVNIVKKTEVQTGGFSKESILPKRNSDKL
IARKKDWDPKKYGGFDSPTVAYSVLVVAKVEKGKSKKLKSVKELLGITIM
ERSSFEKNPIDFLEAKGYKEVKKDLIIKLPKYSLFELENGRKRMLASAGE
LQKGNELALPSKYVNFLYLASHYEKLKGSPEDNEQKQLFVEQHKHYLDEI
IEQISEFSKRVILADANLDKVLSAYNKHRDKPIREQAENIIHLFTLTNLG
APAAFKYFDTTIDRKRYTSTKEVLDATLIHQSITGLYETRIDLSQLGGD
111.2 Cas9 TadAins 997
MDKKYSIGLAIGTNSVGWAVITDEYKVPSKKFKVLGNTDRHSIKKNLIGA
LLFDSGETAEATRLKRTARRRYTRRKNRICYLQEIFSNEMAKVDDSFFHR
LEESFLVEEDKKHERHPIFGNIVDEVAYHEKYPTIYHLRKKLVDSTDKAD
LRLIYLALAHMIKFRGHFLIEGDLNPDNSDVDKLFIQLVQTYNQLFEENP
INASGVDAKAILSARLSKSRRLENLIAQLPGEKKNGLFGNLIALSLGLTP
NFKSNFDLAEDAKLQLSKDTYDDDLDNLLAQIGDQYADLFLAAKNLSDAI
LLSDILRVNTEITKAPLSASMIKRYDEHHQDLTLLKALVRQQLPEKYKEI
FFDQSKNGYAGYIDGGASQEEFYKFIKPILEKMDGTEELLVKLNREDLLR
KQRTFDNGSIPHQIHLGELHAILRRQEDFYPFLKDNREKIEKILTFRIPY
YVGPLARGNSRFAWMTRKSEETITPWNFEEVVDKGASAQSFIERMTNFDK
NLPNEKVLPKHSLLYEYFTVYNELTKVKYVTEGMRKPAFLSGEQKKAIVD
LLFKTNRKVTVKQLKEDYFKKIECFDSVEISGVEDRFNASLGTYHDLLKI
IKDKDFLDNEENEDILEDIVLTLTLFEDREMIEERLKTYAHLFDDKVMKQ
LKRRRYTGWGRLSRKLINGIRDKQSGKTILDFLKSDGFANRNFMQLIHDD
SLTFKEDIQKAQVSGQGDSLHEHIANLAGSPAIKKGILQTVKVVDELVKV
MGRHKPENIVIEMARENQTTQKGQKNSRERMKRIEEGIKELGSQILKEHP
VENTQLQNEKLYLYYLQNGRDMYVDQELDINRLSDYDVDHIVPQSFLKDD
SIDNKVLTRSDKNRGKSDNVPSEEVVKKMKNYWRQLLNAKLITQRKFDNL
TKAERGGLSELDKAGFIKRQLVETRQITKHVAQILDSRMNTKYDENDKLI
REVKVITLKSKLVSDFRKDFQFYKVREINNYHHAHDAYLNAVVGTALSHE
YWMRHALTLAKRARDEREVPVGAVLVLNNRVIGEGWNRAIGLHDPTAHAE
IMALRQGGLVMQNYRLIDATLYVTFEPCVMCAGAMIHSRIGRVVFGVRNA
KTGAAGSLMDVLHYPGMNHRVEITEGILADECAALLCYFFRMPRQVFNAQ
KKAQSSTDGSSGSSGSETPGTSESATPESSGGSSIKKYPKLESEFVYGDY
KVYDVRKMIAKSEQEIGKATAKYFFYSNIMNFFKTEITLANGEIRKRPLI
ETNGETGEIVWDKGRDFATVRKVLSMPQVNIVKKTEVQTGGFSKESILPK
RNSDKLIARKKDWDPKKYGGFDSPTVAYSVLVVAKVEKGKSKKLKSVKEL
LGITIMERSSFEKNPIDFLEAKGYKEVKKDLIIKLPKYSLFELENGRKRM
LASAGELQKGNELALPSKYVNFLYLASHYEKLKGSPEDNEQKQLFVEQHK
HYLDEIIEQISEFSKRVILADANLDKVLSAYNKHRDKPIREQAENIIHLF
TLTNLGAPAAFKYFDTTIDRKRYTSTKEVLDATLIHQSITGLYETRIDLS
QLGGD
112 delta HNH TadA
MDKKYSIGLAIGTNSVGWAVITDEYKVPSKKFKVLGNTDRHSIKKNLIGA
LLFDSGETAEATRLKRTARRRYTRRKNRICYLQEIFSNEMAKVDDSFFHR
LEESFLVEEDKKHERHPIFGNIVDEVAYHEKYPTIYHLRKKLVDSTDKAD
LRLIYLALAHMIKFRGHFLIEGDLNPDNSDVDKLFIQLVQTYNQLFEENP
INASGVDAKAILSARLSKSRRLENLIAQLPGEKKNGLFGNLIALSLGLTP
NFKSNFDLAEDAKLQLSKDTYDDDLDNLLAQIGDQYADLFLAAKNLSDAI
LLSDILRVNTEITKAPLSASMIKRYDEHHQDLTLLKALVRQQLPEKYKEI
FFDQSKNGYAGYIDGGASQEEFYKFIKPILEKMDGTEELLVKLNREDLLR
KQRTFDNGSIPHQIHLGELHAILRRQEDFYPFLKDNREKIEKILTFRIPY
YVGPLARGNSRFAWMTRKSEETITPWNFEEVVDKGASAQSFIERMTNFDK
NLPNEKVLPKHSLLYEYFTVYNELTKVKYVTEGMRKPAFLSGEQKKAIVD
LLFKTNRKVTVKQLKEDYFKKIECFDSVEISGVEDRFNASLGTYHDLLKI
IKDKDFLDNEENEDILEDIVLTLTLFEDREMIEERLKTYAHLFDDKVMKQ
LKRRRYTGWGRLSRKLINGIRDKQSGKTILDFLKSDGFANRNFMQLIHDD
SLTFKEDIQKAQVSGQGDSLHEHIANLAGSPAIKKGILQTVKVVDELVKV
MGRHKPENIVIEMARENQTTQKGQKNSRERMKRIEEGIKELGSEVEFSHE
YWMRHALTLAKRARDEREVPVGAVLVLNNRVIGEGWNRAIGLHDPTAHAE
IMALRQGGLVMQNYRLIDATLYVTFEPCVMCAGAMIHSRIGRVVFGVRNA
KTGAAGSLMDVLHYPGMNHRVEITEGILADECAALLCYFFRMPRQVFNAQ
KKAQSSTDGGLSELDKAGFIKRQLVETRQITKHVAQILDSRMNTKYDEND
KLIREVKVITLKSKLVSDFRKDFQFYKVREINNYHHAHDAYLNAVVGTAL
IKKYPKLESEFVYGDYKVYDVRKMIAKSEQEIGKATAKYFFYSNIMNFFK
TEITLANGEIRKRPLIETNGETGEIVWDKGRDFATVRKVLSMPQVNIVKK
TEVQTGGFSKESILPKRNSDKLIARKKDWDPKKYGGFDSPTVAYSVLVVA
KVEKGKSKKLKSVKELLGITIMERSSFEKNPIDFLEAKGYKEVKKDLIIK
LPKYSLFELENGRKRMLASAGELQKGNELALPSKYVNFLYLASHYEKLKG
SPEDNEQKQLFVEQHKHYLDEIIEQISEFSKRVILADANLDKVLSAYNKH
RDKPIREQAENIIHLFTLTNLGAPAAFKYFDTTIDRKRYTSTKEVLDATL
IHQSITGLYETRIDLSQLGGD
113 N-term single TadA helix trunc 165-end
MSEVEFSHEYWMRHALTLAKRARDEREVPVGAVLVLNNRVIGEGWNRAIG
LHDPTAHAEIMALRQGGLVMQNYRLIDATLYVTFEPCVMCAGAMIHSRIG
RVVFGVRNAKTGAAGSLMDVLHYPGMNHRVEITEGILADECAALLCYFFR
MPRSGGSSGGSSGSETPGTSESATPESSGGSSGGSDKKYSIGLAIGTNSV
GWAVITDEYKVPSKKFKVLGNTDRHSIKKNLIGALLFDSGETAEATRLKR
TARRRYTRRKNRICYLQEIFSNEMAKVDDSFFHRLEESFLVEEDKKHERH
PIFGNIVDEVAYHEKYPTIYHLRKKLVDSTDKADLRLIYLALAHMIKFRG
HFLIEGDLNPDNSDVDKLFIQLVQTYNQLFEENPINASGVDAKAILSARL
SKSRRLENLIAQLPGEKKNGLFGNLIALSLGLTPNFKSNFDLAEDAKLQL
SKDTYDDDLDNLLAQIGDQYADLFLAAKNLSDAILLSDILRVNTEITKAP
LSASMIKRYDEHHQDLTLLKALVRQQLPEKYKEIFFDQSKNGYAGYIDGG
ASQEEFYKFIKPILEKMDGTEELLVKLNREDLLRKQRTFDNGSIPHQIHL
GELHAILRRQEDFYPFLKDNREKIEKILTFRIPYYVGPLARGNSRFAWMT
RKSEETITPWNFEEVVDKGASAQSFIERMTNFDKNLPNEKVLPKHSLLYE
YFTVYNELTKVKYVTEGMRKPAFLSGEQKKAIVDLLFKTNRKVTVKQLKE
DYFKKIECFDSVEISGVEDRFNASLGTYHDLLKIIKDKDFLDNEENEDIL
EDIVLTLTLFEDREMIEERLKTYAHLFDDKVMKQLKRRRYTGWGRLSRKL
INGIRDKQSGKTILDFLKSDGFANRNFMQLIHDDSLTFKEDIQKAQVSGQ
GDSLHEHIANLAGSPAIKKGILQTVKVVDELVKVMGRHKPENIVIEMARE
NQTTQKGQKNSRERMKRIEEGIKELGSQILKEHPVENTQLQNEKLYLYYL
QNGRDMYVDQELDINRLSDYDVDHIVPQSFLKDDSIDNKVLTRSDKNRGK
SDNVPSEEVVKKMKNYWRQLLNAKLITQRKFDNLTKAERGGLSELDKAGF
IKRQLVETRQITKHVAQILDSRMNTKYDENDKLIREVKVITLKSKLVSDF
RKDFQFYKVREINNYHHAHDAYLNAVVGTALIKKYPKLESEFVYGDYKVY
DVRKMIAKSEQEIGKATAKYFFYSNIMNFFKTEITLANGEIRKRPLIETN
GETGEIVWDKGRDFATVRKVLSMPQVNIVKKTEVQTGGFSKESILPKRNS
DKLIARKKDWDPKKYGGFDSPTVAYSVLVVAKVEKGKSKKLKSVKELLGI
TIMERSSFEKNPIDFLEAKGYKEVKKDLIIKLPKYSLFELENGRKRMLAS
AGELQKGNELALPSKYVNFLYLASHYEKLKGSPEDNEQKQLFVEQHKHYL
DEIIEQISEFSKRVILADANLDKVLSAYNKHRDKPIREQAENIIHLFTLT
NLGAPAAFKYFDTTIDRKRYTSTKEVLDATLIHQSITGLYETRIDLSQLG
GD
114 N-term single TadA helix trunc 165-end delta
59-65
MSEVEFSHEYWMRHALTLAKRARDEREVPVGAVLVLNNRVIGEGWNRTAH
AEIMALRQGGLVMQNYRLIDATLYVTFEPCVMCAGAMIHSRIGRVVFGVR
NAKTGAAGSLMDVLHYPGMNHRVEITEGILADECAALLCYFFRMPRSGGS
SGGSSGSETPGTSESATPESSGGSSGGSDKKYSIGLAIGTNSVGWAVITD
EYKVPSKKFKVLGNTDRHSIKKNLIGALLFDSGETAEATRLKRTARRRYT
RRKNRICYLQEIFSNEMAKVDDSFFHRLEESFLVEEDKKHERHPIFGNIV
DEVAYHEKYPTIYHLRKKLVDSTDKADLRLIYLALAHMIKFRGHFLIEGD
LNPDNSDVDKLFIQLVQTYNQLFEENPINASGVDAKAILSARLSKSRRLE
NLIAQLPGEKKNGLFGNLIALSLGLTPNFKSNFDLAEDAKLQLSKDTYDD
DLDNLLAQIGDQYADLFLAAKNLSDAILLSDILRVNTEITKAPLSASMIK
RYDEHHQDLTLLKALVRQQLPEKYKEIFFDQSKNGYAGYIDGGASQEEFY
KFIKPILEKMDGTEELLVKLNREDLLRKQRTFDNGSIPHQIHLGELHAIL
RRQEDFYPFLKDNREKIEKILTFRIPYYVGPLARGNSRFAWMTRKSEETI
TPWNFEEVVDKGASAQSFIERMTNFDKNLPNEKVLPKHSLLYEYFTVYNE
LTKVKYVTEGMRKPAFLSGEQKKAIVDLLFKTNRKVTVKQLKEDYFKKIE
CFDSVEISGVEDRFNASLGTYHDLLKIIKDKDFLDNEENEDILEDIVLTL
TLFEDREMIEERLKTYAHLFDDKVMKQLKRRRYTGWGRLSRKLINGIRDK
QSGKTILDFLKSDGFANRNFMQLIHDDSLTFKEDIQKAQVSGQGDSLHEH
IANLAGSPAIKKGILQTVKVVDELVKVMGRHKPENIVIEMARENQTTQKG
QKNSRERMKRIEEGIKELGSQILKEHPVENTQLQNEKLYLYYLQNGRDMY
VDQELDINRLSDYDVDHIVPQSFLKDDSIDNKVLTRSDKNRGKSDNVPSE
EVVKKMKNYWRQLLNAKLITQRKFDNLTKAERGGLSELDKAGFIKRQLVE
TRQITKHVAQILDSRMNTKYDENDKLIREVKVITLKSKLVSDFRKDFQFY
KVREINNYHHAHDAYLNAVVGTALIKKYPKLESEFVYGDYKVYDVRKMIA
KSEQEIGKATAKYFFYSNIMNFFKTEITLANGEIRKRPLIETNGETGEIV
WDKGRDFATVRKVLSMPQVNIVKKTEVQTGGFSKESILPKRNSDKLIARK
KDWDPKKYGGFDSPTVAYSVLVVAKVEKGKSKKLKSVKELLGITIMERSS
FEKNPIDFLEAKGYKEVKKDLIIKLPKYSLFELENGRKRMLASAGELQKG
NELALPSKYVNFLYLASHYEKLKGSPEDNEQKQLFVEQHKHYLDEIIEQI
SEFSKRVILADANLDKVLSAYNKHRDKPIREQAENIIHLFTLTNLGAPAA
FKYFDTTIDRKRYTSTKEVLDATLIHQSITGLYETRIDLSQLGGD
115.1 Cas9 TadAins1004
MDKKYSIGLAIGTNSVGWAVITDEYKVPSKKFKVLGNTDRHSIKKNLIGA
LLFDSGETAEATRLKRTARRRYTRRKNRICYLQEIFSNEMAKVDDSFFHR
LEESFLVEEDKKHERHPIFGNIVDEVAYHEKYPTIYHLRKKLVDSTDKAD
LRLIYLALAHMIKFRGHFLIEGDLNPDNSDVDKLFIQLVQTYNQLFEENP
INASGVDAKAILSARLSKSRRLENLIAQLPGEKKNGLFGNLIALSLGLTP
NFKSNFDLAEDAKLQLSKDTYDDDLDNLLAQIGDQYADLFLAAKNLSDAI
LLSDILRVNTEITKAPLSASMIKRYDEHHQDLTLLKALVRQQLPEKYKEI
FFDQSKNGYAGYIDGGASQEEFYKFIKPILEKMDGTEELLVKLNREDLLR
KQRTFDNGSIPHQIHLGELHAILRRQEDFYPFLKDNREKIEKILTFRIPY
YVGPLARGNSRFAWMTRKSEETITPWNFEEVVDKGASAQSFIERMTNFDK
NLPNEKVLPKHSLLYEYFTVYNELTKVKYVTEGMRKPAFLSGEQKKAIVD
LLFKTNRKVTVKQLKEDYFKKIECFDSVEISGVEDRFNASLGTYHDLLKI
IKDKDFLDNEENEDILEDIV+32TLFEDREMIEERLKTYAHLFDDKVMKQ
LKRRRYTGWGRLSRKLINGIRDKQSGKTILDFLKSDGFANRNFMQLIHDD
SLTFKEDIQKAQVSGQGDSLHEHIANLAGSPAIKKGILQTVKVVDELVKV
MGRHKPENIVIEMARENQTTQKGQKNSRERMKRIEEGIKELGSQILKEHP
VENTQLQNEKLYLYYLQNGRDMYVDQELDINRLSDYDVDHIVPQSFLKDD
SIDNKVLTRSDKNRGKSDNVPSEEVVKKMKNYWRQLLNAKLITQRKFDNL
TKAERGGLSELDKAGFIKRQLVETRQITKHVAQILDSRMNTKYDENDKLI
REVKVITLKSKLVSDFRKDFQFYKVREINNYHHAHDAYLNAVVGTALIKK
YPKGSSGSETPGTSESATPESSGSEVEFSHEYWMRHALTLAKRARDEREV
PVGAVLVLNNRVIGEGWNRAIGLHDPTAHAEIMALRQGGLVMQNYRLIDA
TLYVTFEPCVMCAGAMIHSRIGRVVFGVRNAKTGAAGSLMDVLHYPGMNH
RVEITEGILADECAALLCYFFRMPRQLESEFVYGDYKVYDVRKMIAKSEQ
EIGKATAKYFFYSNIMNFFKTEITLANGEIRKRPLIETNGETGEIVWDKG
RDFATVRKVLSMPQVNIVKKTEVQTGGFSKESILPKRNSDKLIARKKDWD
PKKYGGFDSPTVAYSVLVVAKVEKGKSKKLKSVKELLGITIMERSSFEKN
PIDFLEAKGYKEVKKDLIIKLPKYSLFELENGRKRMLASAGELQKGNELA
LPSKYVNFLYLASHYEKLKGSPEDNEQKQLFVEQHKHYLDEIIEQISEFS
KRVILADANLDKVLSAYNKHRDKPIREQAENIIHLFTLTNLGAPAAFKYF
DTTIDRKRYTSTKEVLDATLIHQSITGLYETRIDLSQLGGD
115.2 Cas9 TadAins1005
MDKKYSIGLAIGTNSVGWAVITDEYKVPSKKFKVLGNTDRHSIKKNLIGA
LLFDSGETAEATRLKRTARRRYTRRKNRICYLQEIFSNEMAKVDDSFFHR
LEESFLVEEDKKHERHPIFGNIVDEVAYHEKYPTIYHLRKKLVDSTDKAD
LRLIYLALAHMIKFRGHFLIEGDLNPDNSDVDKLFIQLVQTYNQLFEENP
INASGVDAKAILSARLSKSRRLENLIAQLPGEKKNGLFGNLIALSLGLTP
NFKSNFDLAEDAKLQLSKDTYDDDLDNLLAQIGDQYADLFLAAKNLSDAI
LLSDILRVNTEITKAPLSASMIKRYDEHHQDLTLLKALVRQQLPEKYKEI
FFDQSKNGYAGYIDGGASQEEFYKFIKPILEKMDGTEELLVKLNREDLLR
KQRTFDNGSIPHQIHLGELHAILRRQEDFYPFLKDNREKIEKILTFRIPY
YVGPLARGNSRFAWMTRKSEETITPWNFEEVVDKGASAQSFIERMTNFDK
NLPNEKVLPKHSLLYEYFTVYNELTKVKYVTEGMRKPAFLSGEQKKAIVD
LLFKTNRKVTVKQLKEDYFKKIECFDSVEISGVEDRFNASLGTYHDLLKI
IKDKDFLDNEENEDILEDIVLTLTLFEDREMIEERLKTYAHLFDDKVMKQ
LKRRRYTGWGRLSRKLINGIRDKQSGKTILDFLKSDGFANRNFMQLIHDD
SLTFKEDIQKAQVSGQGDSLHEHIANLAGSPAIKKGILQTVKVVDELVKV
MGRHKPENIVIEMARENQTTQKGQKNSRERMKRIEEGIKELGSQILKEHP
VENTQLQNEKLYLYYLQNGRDMYVDQELDINRLSDYDVDHIVPQSFLKDD
SIDNKVLTRSDKNRGKSDNVPSEEVVKKMKNYWRQLLNAKLITQRKFDNL
TKAERGGLSELDKAGFIKRQLVETRQITKHVAQILDSRMNTKYDENDKLI
REVKVITLKSKLVSDFRKDFQFYKVREINNYHHAHDAYLNAVVGTALIKK
YPKLGSSGSETPGTSESATPESSGSEVEFSHEYWMRHALTLAKRARDERE
VPVGAVLVLNNRVIGEGWNRAIGLHDPTAHAEIMALRQGGLVMQNYRLID
ATLYVTFEPCVMCAGAMIHSRIGRVVFGVRNAKTGAAGSLMDVLHYPGMN
HRVEITEGILADECAALLCYFFRMPRQESEFVYGDYKVYDVRKMIAKSEQ
EIGKATAKYFFYSNIMNFFKTEITLANGEIRKRPLIETNGETGEIVWDKG
RDFATVRKVLSMPQVNIVKKTEVQTGGFSKESILPKRNSDKLIARKKDWD
PKKYGGFDSPTVAYSVLVVAKVEKGKSKKLKSVKELLGITIMERSSFEKN
PIDFLEAKGYKEVKKDLIIKLPKYSLFELENGRKRMLASAGELQKGNELA
LPSKYVNFLYLASHYEKLKGSPEDNEQKQLFVEQHKHYLDEIIEQISEFS
KRVILADANLDKVLSAYNKHRDKPIREQAENIIHLFTLTNLGAPAAFKYF
DTTIDRKRYTSTKEVLDATLIHQSITGLYETRIDLSQLGGD
115.3 Cas9 TadAins1006
MDKKYSIGLAIGTNSVGWAVITDEYKVPSKKFKVLGNTDRHSIKKNLIGA
LLFDSGETAEATRLKRTARRRYTRRKNRICYLQEIFSNEMAKVDDSFFHR
LEESFLVEEDKKHERHPIFGNIVDEVAYHEKYPTIYHLRKKLVDSTDKAD
LRLIYLALAHMIKFRGHFLIEGDLNPDNSDVDKLFIQLVQTYNQLFEENP
INASGVDAKAILSARLSKSRRLENLIAQLPGEKKNGLFGNLIALSLGLTP
NFKSNFDLAEDAKLQLSKDTYDDDLDNLLAQIGDQYADLFLAAKNLSDAI
LLSDILRVNTEITKAPLSASMIKRYDEHHQDLTLLKALVRQQLPEKYKEI
FFDQSKNGYAGYIDGGASQEEFYKFIKPILEKMDGTEELLVKLNREDLLR
KQRTFDNGSIPHQIHLGELHAILRRQEDFYPFLKDNREKIEKILTFRIPY
YVGPLARGNSRFAWMTRKSEETITPWNFEEVVDKGASAQSFIERMTNFDK
NLPNEKVLPKHSLLYEYFTVYNELTKVKYVTEGMRKPAFLSGEQKKAIVD
LLFKTNRKVTVKQLKEDYFKKIECFDSVEISGVEDRFNASLGTYHDLLKI
IKDKDFLDNEENEDILEDIVLTLTLFEDREMIEERLKTYAHLFDDKVMKQ
LKRRRYTGWGRLSRKLINGIRDKQSGKTILDFLKSDGFANRNFMQLIHDD
SLTFKEDIQKAQVSGQGDSLHEHIANLAGSPAIKKGILQTVKVVDELVKV
MGRHKPENIVIEMARENQTTQKGQKNSRERMKRIEEGIKELGSQILKEHP
VENTQLQNEKLYLYYLQNGRDMYVDQELDINRLSDYDVDHIVPQSFLKDD
SIDNKVLTRSDKNRGKSDNVPSEEVVKKMKNYWRQLLNAKLITQRKFDNL
TKAERGGLSELDKAGFIKRQLVETRQITKHVAQILDSRMNTKYDENDKLI
REVKVITLKSKLVSDFRKDFQFYKVREINNYHHAHDAYLNAVVGTALIKK
YPKLEGSSGSETPGTSESATPESSGSEVEFSHEYWMRHALTLAKRARDER
EVPVGAVLVLNNRVIGEGWNRAIGLHDPTAHAEIMALRQGGLVMQNYRLI
DATLYVTFEPCVMCAGAMIHSRIGRVVFGVRNAKTGAAGSLMDVLHYPGM
NHRVEITEGILADECAALLCYFFRMPRQSEFVYGDYKVYDVRKMIAKSEQ
EIGKATAKYFFYSNIMNFFKTEITLANGEIRKRPLIETNGETGEIVWDKG
RDFATVRKVLSMPQVNIVKKTEVQTGGFSKESILPKRNSDKLIARKKDWD
PKKYGGFDSPTVAYSVLVVAKVEKGKSKKLKSVKELLGITIMERSSFEKN
PIDFLEAKGYKEVKKDLIIKLPKYSLFELENGRKRMLASAGELQKGNELA
LPSKYVNFLYLASHYEKLKGSPEDNEQKQLFVEQHKHYLDEIIEQISEFS
KRVILADANLDKVLSAYNKHRDKPIREQAENIIHLFTLTNLGAPAAFKYF
DTTIDRKRYTSTKEVLDATLIHQSITGLYETRIDLSQLGGD
115.4 Cas9 TadAins1007
MDKKYSIGLAIGTNSVGWAVITDEYKVPSKKFKVLGNTDRHSIKKNLIGA
LLFDSGETAEATRLKRTARRRYTRRKNRICYLQEIFSNEMAKVDDSFFHR
LEESFLVEEDKKHERHPIFGNIVDEVAYHEKYPTIYHLRKKLVDSTDKAD
LRLIYLALAHMIKFRGHFLIEGDLNPDNSDVDKLFIQLVQTYNQLFEENP
INASGVDAKAILSARLSKSRRLENLIAQLPGEKKNGLFGNLIALSLGLTP
NFKSNFDLAEDAKLQLSKDTYDDDLDNLLAQIGDQYADLFLAAKNLSDAI
LLSDILRVNTEITKAPLSASMIKRYDEHHQDLTLLKALVRQQLPEKYKEI
FFDQSKNGYAGYIDGGASQEEFYKFIKPILEKMDGTEELLVKLNREDLLR
KQRTFDNGSIPHQIHLGELHAILRRQEDFYPFLKDNREKIEKILTFRIPY
YVGPLARGNSRFAWMTRKSEETITPWNFEEVVDKGASAQSFIERMTNFDK
NLPNEKVLPKHSLLYEYFTVYNELTKVKYVTEGMRKPAFLSGEQKKAIVD
LLFKTNRKVTVKQLKEDYFKKIECFDSVEISGVEDRFNASLGTYHDLLKI
IKDKDFLDNEENEDILEDIVLTLTLFEDREMIEERLKTYAHLFDDKVMKQ
LKRRRYTGWGRLSRKLINGIRDKQSGKTILDFLKSDGFANRNFMQLIHDD
SLTFKEDIQKAQVSGQGDSLHEHIANLAGSPAIKKGILQTVKVVDELVKV
MGRHKPENIVIEMARENQTTQKGQKNSRERMKRIEEGIKELGSQILKEHP
VENTQLQNEKLYLYYLQNGRDMYVDQELDINRLSDYDVDHIVPQSFLKDD
SIDNKVLTRSDKNRGKSDNVPSEEVVKKMKNYWRQLLNAKLITQRKFDNL
TKAERGGLSELDKAGFIKRQLVETRQITKHVAQILDSRMNTKYDENDKLI
REVKVITLKSKLVSDFRKDFQFYKVREINNYHHAHDAYLNAVVGTALIKK
YPKLESGSSGSETPGTSESATPESSGSEVEFSHEYWMRHALTLAKRARDE
REVPVGAVLVLNNRVIGEGWNRAIGLHDPTAHAEIMALRQGGLVMQNYRL
IDATLYVTFEPCVMCAGAMIHSRIGRVVFGVRNAKTGAAGSLMDVLHYPG
MNHRVEITEGILADECAALLCYFFRMPRQEFVYGDYKVYDVRKMIAKSEQ
EIGKATAKYFFYSNIMNFFKTEITLANGEIRKRPLIETNGETGEIVWDKG
RDFATVRKVLSMPQVNIVKKTEVQTGGFSKESILPKRNSDKLIARKKDWD
PKKYGGFDSPTVAYSVLVVAKVEKGKSKKLKSVKELLGITIMERSSFEKN
PIDFLEAKGYKEVKKDLIIKLPKYSLFELENGRKRMLASAGELQKGNELA
LPSKYVNFLYLASHYEKLKGSPEDNEQKQLFVEQHKHYLDEIIEQISEFS
KRVILADANLDKVLSAYNKHRDKPIREQAENIIHLFTLTNLGAPAAFKYF
DTTIDRKRYTSTKEVLDATLIHQSITGLYETRIDLSQLGGD
116.1 Cas9 TadAins C-term truncate2 792
MDKKYSIGLAIGTNSVGWAVITDEYKVPSKKFKVLGNTDRHSIKKNLIGA
LLFDSGETAEATRLKRTARRRYTRRKNRICYLQEIFSNEMAKVDDSFFHR
LEESFLVEEDKKHERHPIFGNIVDEVAYHEKYPTIYHLRKKLVDSTDKAD
LRLIYLALAHMIKFRGHFLIEGDLNPDNSDVDKLFIQLVQTYNQLFEENP
INASGVDAKAILSARLSKSRRLENLIAQLPGEKKNGLFGNLIALSLGLTP
NFKSNFDLAEDAKLQLSKDTYDDDLDNLLAQIGDQYADLFLAAKNLSDAI
LLSDILRVNTEITKAPLSASMIKRYDEHHQDLTLLKALVRQQLPEKYKEI
FFDQSKNGYAGYIDGGASQEEFYKFIKPILEKMDGTEELLVKLNREDLLR
KQRTFDNGSIPHQIHLGELHAILRRQEDFYPFLKDNREKIEKILTFRIPY
YVGPLARGNSRFAWMTRKSEETITPWNFEEVVDKGASAQSFIERMTNFDK
NLPNEKVLPKHSLLYEYFTVYNELTKVKYVTEGMRKPAFLSGEQKKAIVD
LLFKTNRKVTVKQLKEDYFKKIECFDSVEISGVEDRFNASLGTYHDLLKI
IKDKDFLDNEENEDILEDIVLTLTLFEDREMIEERLKTYAHLFDDKVMKQ
LKRRRYTGWGRLSRKLINGIRDKQSGKTILDFLKSDGFANRNFMQLIHDD
SLTFKEDIQKAQVSGQGDSLHEHIANLAGSPAIKKGILQTVKVVDELVKV
MGRHKPENIVIEMARENQTTQKGQKNSRERMKRIEEGIKELGGSSGSETP
GTSESATPESSGSEVEFSHEYWMRHALTLAKRARDEREVPVGAVLVLNNR
VIGEGWNRAIGLHDPTAHAEIMALRQGGLVMQNYRLIDATLYVTFEPCVM
CAGAMIHSRIGRVVFGVRNAKTGAAGSLMDVLHYPGMNHRVEITEGILAD
ECAALLCYFFRMPRQSQILKEHPVENTQLQNEKLYLYYLQNGRDMYVDQE
LDINRLSDYDVDHIVPQSFLKDDSIDNKVLTRSDKNRGKSDNVPSEEVVK
KMKNYWRQLLNAKLITQRKFDNLTKAERGGLSELDKAGFIKRQLVETRQI
TKHVAQILDSRMNTKYDENDKLIREVKVITLKSKLVSDFRKDFQFYKVRE
INNYHHAHDAYLNAVVGTALIKKYPKLESEFVYGDYKVYDVRKMIAKSEQ
EIGKATAKYFFYSNIMNFFKTEITLANGEIRKRPLIETNGETGEIVWDKG
RDFATVRKVLSMPQVNIVKKTEVQTGGFSKESILPKRNSDKLIARKKDWD
PKKYGGFDSPTVAYSVLVVAKVEKGKSKKLKSVKELLGITIMERSSFEKN
PIDFLEAKGYKEVKKDLIIKLPKYSLFELENGRKRMLASAGELQKGNELA
LPSKYVNFLYLASHYEKLKGSPEDNEQKQLFVEQHKHYLDEIIEQISEFS
KRVILADANLDKVLSAYNKHRDKPIREQAENIIHLFTLTNLGAPAAFKYF
DTTIDRKRYTSTKEVLDATLIHQSITGLYETRIDLSQLGGD
116.2 Cas9 TadAins C-term truncate2 791
MDKKYSIGLAIGTNSVGWAVITDEYKVPSKKFKVLGNTDRHSIKKNLIGA
LLFDSGETAEATRLKRTARRRYTRRKNRICYLQEIFSNEMAKVDDSFFHR
LEESFLVEEDKKHERHPIFGNIVDEVAYHEKYPTIYHLRKKLVDSTDKAD
LRLIYLALAHMIKFRGHFLIEGDLNPDNSDVDKLFIQLVQTYNQLFEENP
INASGVDAKAILSARLSKSRRLENLIAQLPGEKKNGLFGNLIALSLGLTP
NFKSNFDLAEDAKLQLSKDTYDDDLDNLLAQIGDQYADLFLAAKNLSDAI
LLSDILRVNTEITKAPLSASMIKRYDEHHQDLTLLKALVRQQLPEKYKEI
FFDQSKNGYAGYIDGGASQEEFYKFIKPILEKMDGTEELLVKLNREDLLR
KQRTFDNGSIPHQIHLGELHAILRRQEDFYPFLKDNREKIEKILTFRIPY
YVGPLARGNSRFAWMTRKSEETITPWNFEEVVDKGASAQSFIERMTNFDK
NLPNEKVLPKHSLLYEYFTVYNELTKVKYVTEGMRKPAFLSGEQKKAIVD
LLFKTNRKVTVKQLKEDYFKKIECFDSVEISGVEDRFNASLGTYHDLLKI
IKDKDFLDNEENEDILEDIVLTLTLFEDREMIEERLKTYAHLFDDKVMKQ
LKRRRYTGWGRLSRKLINGIRDKQSGKTILDFLKSDGFANRNFMQLIHDD
SLTFKEDIQKAQVSGQGDSLHEHIANLAGSPAIKKGILQTVKVVDELVKV
MGRHKPENIVIEMARENQTTQKGQKNSRERMKRIEEGIKELGSSGSETPG
TSESATPESSGSEVEFSHEYWMRHALTLAKRARDEREVPVGAVLVLNNRV
IGEGWNRAIGLHDPTAHAEIMALRQGGLVMQNYRLIDATLYVTFEPCVMC
AGAMIHSRIGRVVFGVRNAKTGAAGSLMDVLHYPGMNHRVEITEGILADE
CAALLCYFFRMPRQGSQILKEHPVENTQLQNEKLYLYYLQNGRDMYVDQE
LDINRLSDYDVDHIVPQSFLKDDSIDNKVLTRSDKNRGKSDNVPSEEVVK
KMKNYWRQLLNAKLITQRKFDNLTKAERGGLSELDKAGFIKRQLVETRQI
TKHVAQILDSRMNTKYDENDKLIREVKVITLKSKLVSDFRKDFQFYKVRE
INNYHHAHDAYLNAVVGTALIKKYPKLESEFVYGDYKVYDVRKMIAKSEQ
EIGKATAKYFFYSNIMNFFKTEITLANGEIRKRPLIETNGETGEIVWDKG
RDFATVRKVLSMPQVNIVKKTEVQTGGFSKESILPKRNSDKLIARKKDWD
PKKYGGFDSPTVAYSVLVVAKVEKGKSKKLKSVKELLGITIMERSSFEKN
PIDFLEAKGYKEVKKDLIIKLPKYSLFELENGRKRMLASAGELQKGNELA
LPSKYVNFLYLASHYEKLKGSPEDNEQKQLFVEQHKHYLDEIIEQISEFS
KRVILADANLDKVLSAYNKHRDKPIREQAENIIHLFTLTNLGAPAAFKYF
DTTIDRKRYTSTKEVLDATLIHQSITGLYETRIDLSQLGGD
116.3 Cas9 TadAins C-term truncate2 790
MDKKYSIGLAIGTNSVGWAVITDEYKVPSKKFKVLGNTDRHSIKKNLIGA
LLFDSGETAEATRLKRTARRRYTRRKNRICYLQEIFSNEMAKVDDSFFHR
LEESFLVEEDKKHERHPIFGNIVDEVAYHEKYPTIYHLRKKLVDSTDKAD
LRLIYLALAHMIKFRGHFLIEGDLNPDNSDVDKLFIQLVQTYNQLFEENP
INASGVDAKAILSARLSKSRRLENLIAQLPGEKKNGLFGNLIALSLGLTP
NFKSNFDLAEDAKLQLSKDTYDDDLDNLLAQIGDQYADLFLAAKNLSDAI
LLSDILRVNTEITKAPLSASMIKRYDEHHQDLTLLKALVRQQLPEKYKEI
FFDQSKNGYAGYIDGGASQEEFYKFIKPILEKMDGTEELLVKLNREDLLR
KQRTFDNGSIPHQIHLGELHAILRRQEDFYPFLKDNREKIEKILTFRIPY
YVGPLARGNSRFAWMTRKSEETITPWNFEEVVDKGASAQSFIERMTNFDK
NLPNEKVLPKHSLLYEYFTVYNELTKVKYVTEGMRKPAFLSGEQKKAIVD
LLFKTNRKVTVKQLKEDYFKKIECFDSVEISGVEDRFNASLGTYHDLLKI
IKDKDFLDNEENEDILEDIVLTLTLFEDREMIEERLKTYAHLFDDKVMKQ
LKRRRYTGWGRLSRKLINGIRDKQSGKTILDFLKSDGFANRNFMQLIHDD
SLTFKEDIQKAQVSGQGDSLHEHIANLAGSPAIKKGILQTVKVVDELVKV
MGRHKPENIVIEMARENQTTQKGQKNSRERMKRIEEGIKEGSSGSETPGT
SESATPESSGSEVEFSHEYWMRHALTLAKRARDEREVPVGAVLVLNNRVI
GEGWNRAIGLHDPTAHAEIMALRQGGLVMQNYRLIDATLYVTFEPCVMCA
GAMIHSRIGRVVFGVRNAKTGAAGSLMDVLHYPGMNHRVEITEGILADEC
AALLCYFFRMPRQLGSQILKEHPVENTQLQNEKLYLYYLQNGRDMYVDQE
LDINRLSDYDVDHIVPQSFLKDDSIDNKVLTRSDKNRGKSDNVPSEEVVK
KMKNYWRQLLNAKLITQRKFDNLTKAERGGLSELDKAGFIKRQLVETRQI
TKHVAQILDSRMNTKYDENDKLIREVKVITLKSKLVSDFRKDFQFYKVRE
INNYHHAHDAYLNAVVGTALIKKYPKLESEFVYGDYKVYDVRKMIAKSEQ
EIGKATAKYFFYSNIMNFFKTEITLANGEIRKRPLIETNGETGEIVWDKG
RDFATVRKVLSMPQVNIVKKTEVQTGGFSKESILPKRNSDKLIARKKDWD
PKKYGGFDSPTVAYSVLVVAKVEKGKSKKLKSVKELLGITIMERSSFEKN
PIDFLEAKGYKEVKKDLIIKLPKYSLFELENGRKRMLASAGELQKGNELA
LPSKYVNFLYLASHYEKLKGSPEDNEQKQLFVEQHKHYLDEIIEQISEFS
KRVILADANLDKVLSAYNKHRDKPIREQAENIIHLFTLTNLGAPAAFKYF
DTTIDRKRYTSTKEVLDATLIHQSITGLYETRIDLSQLGGD
117 Cas9 delta 1017-1069
MDKKYSIGLAIGTNSVGWAVITDEYKVPSKKFKVLGNTDRHSIKKNLIGA
LLFDSGETAEATRLKRTARRRYTRRKNRICYLQEIFSNEMAKVDDSFFHR
LEESFLVEEDKKHERHPIFGNIVDEVAYHEKYPTIYHLRKKLVDSTDKAD
LRLIYLALAHMIKFRGHFLIEGDLNPDNSDVDKLFIQLVQTYNQLFEENP
INASGVDAKAILSARLSKSRRLENLIAQLPGEKKNGLFGNLIALSLGLTP
NFKSNFDLAEDAKLQLSKDTYDDDLDNLLAQIGDQYADLFLAAKNLSDAI
LLSDILRVNTEITKAPLSASMIKRYDEHHQDLTLLKALVRQQLPEKYKEI
FFDQSKNGYAGYIDGGASQEEFYKFIKPILEKMDGTEELLVKLNREDLLR
KQRTFDNGSIPHQIHLGELHAILRRQEDFYPFLKDNREKIEKILTFRIPY
YVGPLARGNSRFAWMTRKSEETITPWNFEEVVDKGASAQSFIERMTNFDK
NLPNEKVLPKHSLLYEYFTVYNELTKVKYVTEGMRKPAFLSGEQKKAIVD
LLFKTNRKVTVKQLKEDYFKKIECFDSVEISGVEDRFNASLGTYHDLLKI
IKDKDFLDNEENEDILEDIVLTLTLFEDREMIEERLKTYAHLFDDKVMKQ
LKRRRYTGWGRLSRKLINGIRDKQSGKTILDFLKSDGFANRNFMQLIHDD
SLTFKEDIQKAQVSGQGDSLHEHIANLAGSPAIKKGILQTVKVVDELVKV
MGRHKPENIVIEMARENQTTQKGQKNSRERMKRIEEGIKELGSQILKEHP
VENTQLQNEKLYLYYLQNGRDMYVDQELDINRLSDYDVDHIVPQSFLKDD
SIDNKVLTRSDKNRGKSDNVPSEEVVKKMKNYWRQLLNAKLITQRKFDNL
TKAERGGLSELDKAGFIKRQLVETRQITKHVAQILDSRMNTKYDENDKLI
REVKVITLKSKLVSDFRKDFQFYKVREINNYHHAHDAYLNAVVGTALIKK
YPKLESEFVYGDYKVYSSGSEVEFSHEYWMRHALTLAKRARDEREVPVGA
VLVLNNRVIGEGWNRAIGLHDPTAHAEIMALRQGGLVMQNYRLIDATLYV
TFEPCVMCAGAMIHSRIGRVVFGVRNAKTGAAGSLMDVLHYPGMNHRVEI
TEGILADECAALLCYFFRMPRQVFNAQKKAQSSTDGEIVWDKGRDFATVR
KVLSMPQVNIVKKTEVQTGGFSKESILPKRNSDKLIARKKDWDPKKYGGF
DSPTVAYSVLVVAKVEKGKSKKLKSVKELLGITIMERSSFEKNPIDFLEA
KGYKEVKKDLIIKLPKYSLFELENGRKRMLASAGELQKGNELALPSKYVN
FLYLASHYEKLKGSPEDNEQKQLFVEQHKHYLDEIIEQISEFSKRVILAD
ANLDKVLSAYNKHRDKPIREQAENIIHLFTLTNLGAPAAFKYFDTTIDRK
RYTSTKEVLDATLIHQSITGLYETRIDLSQLGGD
118 Cas9 TadA-CP116ins 1067
MDKKYSIGLAIGTNSVGWAVITDEYKVPSKKFKVLGNTDRHSIKKNLIGA
LLFDSGETAEATRLKRTARRRYTRRKNRICYLQEIFSNEMAKVDDSFFHR
LEESFLVEEDKKHERHPIFGNIVDEVAYHEKYPTIYHLRKKLVDSTDKAD
LRLIYLALAHMIKFRGHFLIEGDLNPDNSDVDKLFIQLVQTYNQLFEENP
INASGVDAKAILSARLSKSRRLENLIAQLPGEKKNGLFGNLIALSLGLTP
NFKSNFDLAEDAKLQLSKDTYDDDLDNLLAQIGDQYADLFLAAKNLSDAI
LLSDILRVNTEITKAPLSASMIKRYDEHHQDLTLLKALVRQQLPEKYKEI
FFDQSKNGYAGYIDGGASQEEFYKFIKPILEKMDGTEELLVKLNREDLLR
KQRTFDNGSIPHQIHLGELHAILRRQEDFYPFLKDNREKIEKILTFRIPY
YVGPLARGNSRFAWMTRKSEETITPWNFEEVVDKGASAQSFIERMTNFDK
NLPNEKVLPKHSLLYEYFTVYNELTKVKYVTEGMRKPAFLSGEQKKAIVD
LLFKTNRKVTVKQLKEDYFKKIECFDSVEISGVEDRFNASLGTYHDLLKI
IKDKDFLDNEENEDILEDIVLTLTLFEDREMIEERLKTYAHLFDDKVMKQ
LKRRRYTGWGRLSRKLINGIRDKQSGKTILDFLKSDGFANRNFMQLIHDD
SLTFKEDIQKAQVSGQGDSLHEHIANLAGSPAIKKGILQTVKVVDELVKV
MGRHKPENIVIEMARENQTTQKGQKNSRERMKRIEEGIKELGSQILKEHP
VENTQLQNEKLYLYYLQNGRDMYVDQELDINRLSDYDVDHIVPQSFLKDD
SIDNKVLTRSDKNRGKSDNVPSEEVVKKMKNYWRQLLNAKLITQRKFDNL
TKAERGGLSELDKAGFIKRQLVETRQITKHVAQILDSRMNTKYDENDKLI
REVKVITLKSKLVSDFRKDFQFYKVREINNYHHAHDAYLNAVVGTALIKK
YPKLESEFVYGDYKVYDVRKMIAKSEQEIGKATAKYFFYSNIMNFFKTEI
TLANGEIRKRPLIETNMNHRVEITEGILADECAALLCYFFRMPRQVFNAQ
KKAQSSTDGSSGSETPGTSESATPESSGSEVEFSHEYWMRHALTLAKRAR
DEREVPVGAVLVLNNRVIGEGWNRAIGLHDPTAHAEIMALRQGGLVMQNY
RLIDATLYVTFEPCVMCAGAMIHSRIGRVVFGVRNAKTGAAGSLMDVLHY
PGGETGEIVWDKGRDFATVRKVLSMPQVNIVKKTEVQTGGFSKESILPKR
NSDKLIARKKDWDPKKYGGFDSPTVAYSVLVVAKVEKGKSKKLKSVKELL
GITIMERSSFEKNPIDFLEAKGYKEVKKDLIIKLPKYSLFELENGRKRML
ASAGELQKGNELALPSKYVNFLYLASHYEKLKGSPEDNEQKQLFVEQHKH
YLDEIIEQISEFSKRVILADANLDKVLSAYNKHRDKPIREQAENIIHLFT
LTNLGAPAAFKYFDTTIDRKRYTSTKEVLDATLIHQSITGLYETRIDLSQ
LGGD
119 Cas9 TadAins 701
MDKKYSIGLAIGTNSVGWAVITDEYKVPSKKFKVLGNTDRHSIKKNLIGA
LLFDSGETAEATRLKRTARRRYTRRKNRICYLQEIFSNEMAKVDDSFFHR
LEESFLVEEDKKHERHPIFGNIVDEVAYHEKYPTIYHLRKKLVDSTDKAD
LRLIYLALAHMIKFRGHFLIEGDLNPDNSDVDKLFIQLVQTYNQLFEENP
INASGVDAKAILSARLSKSRRLENLIAQLPGEKKNGLFGNLIALSLGLTP
NFKSNFDLAEDAKLQLSKDTYDDDLDNLLAQIGDQYADLFLAAKNLSDAI
LLSDILRVNTEITKAPLSASMIKRYDEHHQDLTLLKALVRQQLPEKYKEI
FFDQSKNGYAGYIDGGASQEEFYKFIKPILEKMDGTEELLVKLNREDLLR
KQRTFDNGSIPHQIHLGELHAILRRQEDFYPFLKDNREKIEKILTFRIPY
YVGPLARGNSRFAWMTRKSEETITPWNFEEVVDKGASAQSFIERMTNFDK
NLPNEKVLPKHSLLYEYFTVYNELTKVKYVTEGMRKPAFLSGEQKKAIVD
LLFKTNRKVTVKQLKEDYFKKIECFDSVEISGVEDRFNASLGTYHDLLKI
IKDKDFLDNEENEDILEDIVLTLTLFEDREMIEERLKTYAHLFDDKVMKQ
LKRRRYTGWGRLSRKLINGIRDKQSGKTILDFLKSDGFANRNFMQLIHDD
SGSSGSETPGTSESATPESSGSEVEFSHEYWMRHALTLAKRARDEREVPV
GAVLVLNNRVIGEGWNRAIGLHDPTAHAEIMALRQGGLVMQNYRLIDATL
YVTFEPCVMCAGAMIHSRIGRVVFGVRNAKTGAAGSLMDVLHYPGMNHRV
EITEGILADECAALLCYFFRMPRQVFNAQKKAQSSTDLTFKEDIQKAQVS
GQGDSLHEHIANLAGSPAIKKGILQTVKVVDELVKVMGRHKPENIVIEMA
RENQTTQKGQKNSRERMKRIEEGIKELGSQILKEHPVENTQLQNEKLYLY
YLQNGRDMYVDQELDINRLSDYDVDHIVPQSFLKDDSIDNKVLTRSDKNR
GKSDNVPSEEVVKKMKNYWRQLLNAKLITQRKFDNLTKAERGGLSELDKA
GFIKRQLVETRQITKHVAQILDSRMNTKYDENDKLIREVKVITLKSKLVS
DFRKDFQFYKVREINNYHHAHDAYLNAVVGTALIKKYPKLESEFVYGDYK
VYDVRKMIAKSEQEIGKATAKYFFYSNIMNFFKTEITLANGEIRKRPLIE
TNGETGEIVWDKGRDFATVRKVLSMPQVNIVKKTEVQTGGFSKESILPKR
NSDKLIARKKDWDPKKYGGFDSPTVAYSVLVVAKVEKGKSKKLKSVKELL
GITIMERSSFEKNPIDFLEAKGYKEVKKDLIIKLPKYSLFELENGRKRML
ASAGELQKGNELALPSKYVNFLYLASHYEKLKGSPEDNEQKQLFVEQHKH
YLDEIIEQISEFSKRVILADANLDKVLSAYNKHRDKPIREQAENIIHLFT
LTNLGAPAAFKYFDTTIDRKRYTSTKEVLDATLIHQSITGLYETRIDLSQ
LGGD
120 Cas9 TadACP136ins 1248
MDKKYSIGLAIGTNSVGWAVITDEYKVPSKKFKVLGNTDRHSIKKNLIGA
LLFDSGETAEATRLKRTARRRYTRRKNRICYLQEIFSNEMAKVDDSFFHR
LEESFLVEEDKKHERHPIFGNIVDEVAYHEKYPTIYHLRKKLVDSTDKAD
LRLIYLALAHMIKFRGHFLIEGDLNPDNSDVDKLFIQLVQTYNQLFEENP
INASGVDAKAILSARLSKSRRLENLIAQLPGEKKNGLFGNLIALSLGLTP
NFKSNFDLAEDAKLQLSKDTYDDDLDNLLAQIGDQYADLFLAAKNLSDAI
LLSDILRVNTEITKAPLSASMIKRYDEHHQDLTLLKALVRQQLPEKYKEI
FFDQSKNGYAGYIDGGASQEEFYKFIKPILEKMDGTEELLVKLNREDLLR
KQRTFDNGSIPHQIHLGELHAILRRQEDFYPFLKDNREKIEKILTFRIPY
YVGPLARGNSRFAWMTRKSEETITPWNFEEVVDKGASAQSFIERMTNFDK
NLPNEKVLPKHSLLYEYFTVYNELTKVKYVTEGMRKPAFLSGEQKKAIVD
LLFKTNRKVTVKQLKEDYFKKIECFDSVEISGVEDRFNASLGTYHDLLKI
IKDKDFLDNEENEDILEDIVLTLTLFEDREMIEERLKTYAHLFDDKVMKQ
LKRRRYTGWGRLSRKLINGIRDKQSGKTILDFLKSDGFANRNFMQLIHDD
SLTFKEDIQKAQVSGQGDSLHEHIANLAGSPAIKKGILQTVKVVDELVKV
MGRHKPENIVIEMARENQTTQKGQKNSRERMKRIEEGIKELGSQILKEHP
VENTQLQNEKLYLYYLQNGRDMYVDQELDINRLSDYDVDHIVPQSFLKDD
SIDNKVLTRSDKNRGKSDNVPSEEVVKKMKNYWRQLLNAKLITQRKFDNL
TKAERGGLSELDKAGFIKRQLVETRQITKHVAQILDSRMNTKYDENDKLI
REVKVITLKSKLVSDFRKDFQFYKVREINNYHHAHDAYLNAVVGTALIKK
YPKLESEFVYGDYKVYDVRKMIAKSEQEIGKATAKYFFYSNIMNFFKTEI
TLANGEIRKRPLIETNGETGEIVWDKGRDFATVRKVLSMPQVNIVKKTEV
QTGGFSKESILPKRNSDKLIARKKDWDPKKYGGFDSPTVAYSVLVVAKVE
KGKSKKLKSVKELLGITIMERSSFEKNPIDFLEAKGYKEVKKDLIIKLPK
YSLFELENGRKRMLASAGELQKGNELALPSKYVNFLYLASHYEKLKGSMN
HRVEITEGILADECAALLCYFFRMPRQVFNAQKKAQSSTDGSSGSETPGT
SESATPESSGSEVEFSHEYWMRHALTLAKRARDEREVPVGAVLVLNNRVI
GEGWNRAIGLHDPTAHAEIMALRQGGLVMQNYRLIDATLYVTFEPCVMCA
GAMIHSRIGRVVFGVRNAKTGAAGSLMDVLHYPGPEDNEQKQLFVEQHKH
YLDEIIEQISEFSKRVILADANLDKVLSAYNKHRDKPIREQAENIIHLFT
LTNLGAPAAFKYFDTTIDRKRYTSTKEVLDATLIHQSITGLYETRIDLSQ
LGGD
121 Cas9 TadACP136ins 1052
MDKKYSIGLAIGTNSVGWAVITDEYKVPSKKFKVLGNTDRHSIKKNLIGA
LLFDSGETAEATRLKRTARRRYTRRKNRICYLQEIFSNEMAKVDDSFFHR
LEESFLVEEDKKHERHPIFGNIVDEVAYHEKYPTIYHLRKKLVDSTDKAD
LRLIYLALAHMIKFRGHFLIEGDLNPDNSDVDKLFIQLVQTYNQLFEENP
INASGVDAKAILSARLSKSRRLENLIAQLPGEKKNGLFGNLIALSLGLTP
NFKSNFDLAEDAKLQLSKDTYDDDLDNLLAQIGDQYADLFLAAKNLSDAI
LLSDILRVNTEITKAPLSASMIKRYDEHHQDLTLLKALVRQQLPEKYKEI
FFDQSKNGYAGYIDGGASQEEFYKFIKPILEKMDGTEELLVKLNREDLLR
KQRTFDNGSIPHQIHLGELHAILRRQEDFYPFLKDNREKIEKILTFRIPY
YVGPLARGNSRFAWMTRKSEETITPWNFEEVVDKGASAQSFIERMTNFDK
NLPNEKVLPKHSLLYEYFTVYNELTKVKYVTEGMRKPAFLSGEQKKAIVD
LLFKTNRKVTVKQLKEDYFKKIECFDSVEISGVEDRFNASLGTYHDLLKI
IKDKDFLDNEENEDILEDIVLTLTLFEDREMIEERLKTYAHLFDDKVMKQ
LKRRRYTGWGRLSRKLINGIRDKQSGKTILDFLKSDGFANRNFMQLIHDD
SLTFKEDIQKAQVSGQGDSLHEHIANLAGSPAIKKGILQTVKVVDELVKV
MGRHKPENIVIEMARENQTTQKGQKNSRERMKRIEEGIKELGSQILKEHP
VENTQLQNEKLYLYYLQNGRDMYVDQELDINRLSDYDVDHIVPQSFLKDD
SIDNKVLTRSDKNRGKSDNVPSEEVVKKMKNYWRQLLNAKLITQRKFDNL
TKAERGGLSELDKAGFIKRQLVETRQITKHVAQILDSRMNTKYDENDKLI
REVKVITLKSKLVSDFRKDFQFYKVREINNYHHAHDAYLNAVVGTALIKK
YPKLESEFVYGDYKVYDVRKMIAKSEQEIGKATAKYFFYSNIMNFFKTEI
TLAMNHRVEITEGILADECAALLCYFFRMPRQVFNAQKKAQSSTDGSSGS
EIPGTSESATPESSGSEVEFSHEYWMRHALTLAKRARDEREVPVGAVLVL
NNRVIGEGWNRAIGLHDPTAHAEIMALRQGGLVMQNYRLIDATLYVTFEP
CVMCAGAMIHSRIGRVVFGVRNAKTGAAGSLMDVLHYPGNGEIRKRPLIE
TNGETGEIVWDKGRDFATVRKVLSMPQVNIVKKTEVQTGGFSKESILPKR
NSDKLIARKKDWDPKKYGGFDSPTVAYSVLVVAKVEKGKSKKLKSVKELL
GITIMERSSFEKNPIDFLEAKGYKEVKKDLIIKLPKYSLFELENGRKRML
ASAGELQKGNELALPSKYVNFLYLASHYEKLKGSPEDNEQKQLFVEQHKH
YLDEIIEQISEFSKRVILADANLDKVLSAYNKHRDKPIREQAENIIHLFT
LTNLGAPAAFKYFDTTIDRKRYTSTKEVLDATLIHQSITGLYETRIDLSQ
LGGD
122 Cas9 TadACP136ins 1041
MDKKYSIGLAIGTNSVGWAVITDEYKVPSKKFKVLGNTDRHSIKKNLIGA
LLFDSGETAEATRLKRTARRRYTRRKNRICYLQEIFSNEMAKVDDSFFHR
LEESFLVEEDKKHERHPIFGNIVDEVAYHEKYPTIYHLRKKLVDSTDKAD
LRLIYLALAHMIKFRGHFLIEGDLNPDNSDVDKLFIQLVQTYNQLFEENP
INASGVDAKAILSARLSKSRRLENLIAQLPGEKKNGLFGNLIALSLGLTP
NFKSNFDLAEDAKLQLSKDTYDDDLDNLLAQIGDQYADLFLAAKNLSDAI
LLSDILRVNTEITKAPLSASMIKRYDEHHQDLTLLKALVRQQLPEKYKEI
FFDQSKNGYAGYIDGGASQEEFYKFIKPILEKMDGTEELLVKLNREDLLR
KQRTFDNGSIPHQIHLGELHAILRRQEDFYPFLKDNREKIEKILTFRIPY
YVGPLARGNSRFAWMTRKSEETITPWNFEEVVDKGASAQSFIERMTNFDK
NLPNEKVLPKHSLLYEYFTVYNELTKVKYVTEGMRKPAFLSGEQKKAIVD
LLFKTNRKVTVKQLKEDYFKKIECFDSVEISGVEDRFNASLGTYHDLLKI
IKDKDFLDNEENEDILEDIVLTLTLFEDREMIEERLKTYAHLFDDKVMKQ
LKRRRYTGWGRLSRKLINGIRDKQSGKTILDFLKSDGFANRNFMQLIHDD
SLTFKEDIQKAQVSGQGDSLHEHIANLAGSPAIKKGILQTVKVVDELVKV
MGRHKPENIVIEMARENQTTQKGQKNSRERMKRIEEGIKELGSQILKEHP
VENTQLQNEKLYLYYLQNGRDMYVDQELDINRLSDYDVDHIVPQSFLKDD
SIDNKVLTRSDKNRGKSDNVPSEEVVKKMKNYWRQLLNAKLITQRKFDNL
TKAERGGLSELDKAGFIKRQLVETRQITKHVAQILDSRMNTKYDENDKLI
REVKVITLKSKLVSDFRKDFQFYKVREINNYHHAHDAYLNAVVGTALIKK
YPKLESEFVYGDYKVYDVRKMIAKSEQEIGKATAKYFFYSMNHRVEITEG
ILADECAALLCYFFRMPRQVFNAQKKAQSSTDGSSGSETPGTSESATPES
SGSEVEFSHEYWMRHALTLAKRARDEREVPVGAVLVLNNRVIGEGWNRAI
GLHDPTAHAEIMALRQGGLVMQNYRLIDATLYVTFEPCVMCAGAMIHSRI
GRVVFGVRNAKTGAAGSLMDVLHYPGNIMNFFKTEITLANGEIRKRPLIE
TNGETGEIVWDKGRDFATVRKVLSMPQVNIVKKTEVQTGGFSKESILPKR
NSDKLIARKKDWDPKKYGGFDSPTVAYSVLVVAKVEKGKSKKLKSVKELL
GITIMERSSFEKNPIDFLEAKGYKEVKKDLIIKLPKYSLFELENGRKRML
ASAGELQKGNELALPSKYVNFLYLASHYEKLKGSPEDNEQKQLFVEQHKH
YLDEIIEQISEFSKRVILADANLDKVLSAYNKHRDKPIREQAENIIHLFT
LTNLGAPAAFKYFDTTIDRKRYTSTKEVLDATLIHQSITGLYETRIDLSQ
LGGD
123 Cas9 TadACP139ins 1299
MDKKYSIGLAIGTNSVGWAVITDEYKVPSKKFKVLGNTDRHSIKKNLIGA
LLFDSGETAEATRLKRTARRRYTRRKNRICYLQEIFSNEMAKVDDSFFHR
LEESFLVEEDKKHERHPIFGNIVDEVAYHEKYPTIYHLRKKLVDSTDKAD
LRLIYLALAHMIKFRGHFLIEGDLNPDNSDVDKLFIQLVQTYNQLFEENP
INASGVDAKAILSARLSKSRRLENLIAQLPGEKKNGLFGNLIALSLGLTP
NFKSNFDLAEDAKLQLSKDTYDDDLDNLLAQIGDQYADLFLAAKNLSDAI
LLSDILRVNTEITKAPLSASMIKRYDEHHQDLTLLKALVRQQLPEKYKEI
FFDQSKNGYAGYIDGGASQEEFYKFIKPILEKMDGTEELLVKLNREDLLR
KQRTFDNGSIPHQIHLGELHAILRRQEDFYPFLKDNREKIEKILTFRIPY
YVGPLARGNSRFAWMTRKSEETITPWNFEEVVDKGASAQSFIERMTNFDK
NLPNEKVLPKHSLLYEYFTVYNELTKVKYVTEGMRKPAFLSGEQKKAIVD
LLFKTNRKVTVKQLKEDYFKKIECFDSVEISGVEDRFNASLGTYHDLLKI
IKDKDFLDNEENEDILEDIVLTLTLFEDREMIEERLKTYAHLFDDKVMKQ
LKRRRYTGWGRLSRKLINGIRDKQSGKTILDFLKSDGFANRNFMQLIHDD
SLTFKEDIQKAQVSGQGDSLHEHIANLAGSPAIKKGILQTVKVVDELVKV
MGRHKPENIVIEMARENQTTQKGQKNSRERMKRIEEGIKELGSQILKEHP
VENTQLQNEKLYLYYLQNGRDMYVDQELDINRLSDYDVDHIVPQSFLKDD
SIDNKVLTRSDKNRGKSDNVPSEEVVKKMKNYWRQLLNAKLITQRKFDNL
TKAERGGLSELDKAGFIKRQLVETRQITKHVAQILDSRMNTKYDENDKLI
REVKVITLKSKLVSDFRKDFQFYKVREINNYHHAHDAYLNAVVGTALIKK
YPKLESEFVYGDYKVYDVRKMIAKSEQEIGKATAKYFFYSNIMNFFKTEI
TLANGEIRKRPLIETNGETGEIVWDKGRDFATVRKVLSMPQVNIVKKTEV
QTGGFSKESILPKRNSDKLIARKKDWDPKKYGGFDSPTVAYSVLVVAKVE
KGKSKKLKSVKELLGITIMERSSFEKNPIDFLEAKGYKEVKKDLIIKLPK
YSLFELENGRKRMLASAGELQKGNELALPSKYVNFLYLASHYEKLKGSPE
DNEQKQLFVEQHKHYLDEIIEQISEFSKRVILADANLDKVLSAYNKHRMN
HRVEITEGILADECAALLCYFFRMPRQVFNAQKKAQSSTDGSSGSETPGT
SESATPESSGSEVEFSHEYWMRHALTLAKRARDEREVPVGAVLVLNNRVI
GEGWNRAIGLHDPTAHAEIMALRQGGLVMQNYRLIDATLYVTFEPCVMCA
GAMIHSRIGRVVFGVRNAKTGAAGSLMDVLHYPGDKPIREQAENIIHLFT
LTNLGAPAAFKYFDTTIDRKRYTSTKEVLDATLIHQSITGLYETRIDLSQ
LGGD
124 Cas9 delta 792-872 TadAins
MDKKYSIGLAIGTNSVGWAVITDEYKVPSKKFKVLGNTDRHSIKKNLIGA
LLFDSGETAEATRLKRTARRRYTRRKNRICYLQEIFSNEMAKVDDSFFHR
LEESFLVEEDKKHERHPIFGNIVDEVAYHEKYPTIYHLRKKLVDSTDKAD
LRLIYLALAHMIKFRGHFLIEGDLNPDNSDVDKLFIQLVQTYNQLFEENP
INASGVDAKAILSARLSKSRRLENLIAQLPGEKKNGLFGNLIALSLGLTP
NFKSNFDLAEDAKLQLSKDTYDDDLDNLLAQIGDQYADLFLAAKNLSDAI
LLSDILRVNTEITKAPLSASMIKRYDEHHQDLTLLKALVRQQLPEKYKEI
FFDQSKNGYAGYIDGGASQEEFYKFIKPILEKMDGTEELLVKLNREDLLR
KQRTFDNGSIPHQIHLGELHAILRRQEDFYPFLKDNREKIEKILTFRIPY
YVGPLARGNSRFAWMTRKSEETITPWNFEEVVDKGASAQSFIERMTNFDK
NLPNEKVLPKHSLLYEYFTVYNELTKVKYVTEGMRKPAFLSGEQKKAIVD
LLFKTNRKVTVKQLKEDYFKKIECFDSVEISGVEDRFNASLGTYHDLLKI
IKDKDFLDNEENEDILEDIVLTLTLFEDREMIEERLKTYAHLFDDKVMKQ
LKRRRYTGWGRLSRKLINGIRDKQSGKTILDFLKSDGFANRNFMQLIHDD
SLTFKEDIQKAQVSGQGDSLHEHIANLAGSPAIKKGILQTVKVVDELVKV
MGRHKPENIVIEMARENQTTQKGQKNSRERMKRIEEGIKELGSEVEFSHE
YWMRHALTLAKRARDEREVPVGAVLVLNNRVIGEGWNRAIGLHDPTAHAE
IMALRQGGLVMQNYRLIDATLYVTFEPCVMCAGAMIHSRIGRVVFGVRNA
KTGAAGSLMDVLHYPGMNHRVEITEGILADECAALLCYFFRMPRQVFNAQ
KKAQSSTDEEVVKKMKNYWRQLLNAKLITQRKFDNLTKAERGGLSELDKA
GFIKRQLVETRQITKHVAQILDSRMNTKYDENDKLIREVKVITLKSKLVS
DFRKDFQFYKVREINNYHHAHDAYLNAVVGTALIKKYPKLESEFVYGDYK
VYDVRKMIAKSEQEIGKATAKYFFYSNIMNFFKTEITLANGEIRKRPLIE
TNGETGEIVWDKGRDFATVRKVLSMPQVNIVKKTEVQTGGFSKESILPKR
NSDKLIARKKDWDPKKYGGFDSPTVAYSVLVVAKVEKGKSKKLKSVKELL
GITIMERSSFEKNPIDFLEAKGYKEVKKDLIIKLPKYSLFELENGRKRML
ASAGELQKGNELALPSKYVNFLYLASHYEKLKGSPEDNEQKQLFVEQHKH
YLDEIIEQISEFSKRVILADANLDKVLSAYNKHRDKPIREQAENIIHLFT
LTNLGAPAAFKYFDTTIDRKRYTSTKEVLDATLIHQSITGLYETRIDLSQ
LGGD
125 Cas9 delta 792-906 TadAins
MDKKYSIGLAIGTNSVGWAVITDEYKVPSKKFKVLGNTDRHSIKKNLIGA
LLFDSGETAEATRLKRTARRRYTRRKNRICYLQEIFSNEMAKVDDSFFHR
LEESFLVEEDKKHERHPIFGNIVDEVAYHEKYPTIYHLRKKLVDSTDKAD
LRLIYLALAHMIKFRGHFLIEGDLNPDNSDVDKLFIQLVQTYNQLFEENP
INASGVDAKAILSARLSKSRRLENLIAQLPGEKKNGLFGNLIALSLGLTP
NFKSNFDLAEDAKLQLSKDTYDDDLDNLLAQIGDQYADLFLAAKNLSDAI
LLSDILRVNTEITKAPLSASMIKRYDEHHQDLTLLKALVRQQLPEKYKEI
FFDQSKNGYAGYIDGGASQEEFYKFIKPILEKMDGTEELLVKLNREDLLR
KQRTFDNGSIPHQIHLGELHAILRRQEDFYPFLKDNREKIEKILTFRIPY
YVGPLARGNSRFAWMTRKSEETITPWNFEEVVDKGASAQSFIERMTNFDK
NLPNEKVLPKHSLLYEYFTVYNELTKVKYVTEGMRKPAFLSGEQKKAIVD
LLFKTNRKVTVKQLKEDYFKKIECFDSVEISGVEDRFNASLGTYHDLLKI
IKDKDFLDNEENEDILEDIVLTLTLFEDREMIEERLKTYAHLFDDKVMKQ
LKRRRYTGWGRLSRKLINGIRDKQSGKTILDFLKSDGFANRNFMQLIHDD
SLTFKEDIQKAQVSGQGDSLHEHIANLAGSPAIKKGILQTVKVVDELVKV
MGRHKPENIVIEMARENQTTQKGQKNSRERMKRIEEGIKELGSEVEFSHE
YWMRHALTLAKRARDEREVPVGAVLVLNNRVIGEGWNRAIGLHDPTAHAE
IMALRQGGLVMQNYRLIDATLYVTFEPCVMCAGAMIHSRIGRVVFGVRNA
KTGAAGSLMDVLHYPGMNHRVEITEGILADECAALLCYFFRMPRQVFNAQ
KKAQSSTDGLSELDKAGFIKRQLVETRQITKHVAQILDSRMNTKYDENDK
LIREVKVITLKSKLVSDFRKDFQFYKVREINNYHHAHDAYLNAVVGTALI
KKYPKLESEFVYGDYKVYDVRKMIAKSEQEIGKATAKYFFYSNIMNFFKT
EITLANGEIRKRPLIETNGETGEIVWDKGRDFATVRKVLSMPQVNIVKKT
EVQTGGFSKESILPKRNSDKLIARKKDWDPKKYGGFDSPTVAYSVLVVAK
VEKGKSKKLKSVKELLGITIMERSSFEKNPIDFLEAKGYKEVKKDLIIKL
PKYSLFELENGRKRMLASAGELQKGNELALPSKYVNFLYLASHYEKLKGS
PEDNEQKQLFVEQHKHYLDEIIEQISEFSKRVILADANLDKVLSAYNKHR
DKPIREQAENIIHLFTLTNLGAPAAFKYFDTTIDRKRYTSTKEVLDATLI
HQSITGLYETRIDLSQLGGD
126 TadA CP65ins 1003
MDKKYSIGLAIGTNSVGWAVITDEYKVPSKKFKVLGNTDRHSIKKNLIGA
LLFDSGETAEATRLKRTARRRYTRRKNRICYLQEIFSNEMAKVDDSFFHR
LEESFLVEEDKKHERHPIFGNIVDEVAYHEKYPTIYHLRKKLVDSTDKAD
LRLIYLALAHMIKFRGHFLIEGDLNPDNSDVDKLFIQLVQTYNQLFEENP
INASGVDAKAILSARLSKSRRLENLIAQLPGEKKNGLFGNLIALSLGLTP
NFKSNFDLAEDAKLQLSKDTYDDDLDNLLAQIGDQYADLFLAAKNLSDAI
LLSDILRVNTEITKAPLSASMIKRYDEHHQDLTLLKALVRQQLPEKYKEI
FFDQSKNGYAGYIDGGASQEEFYKFIKPILEKMDGTEELLVKLNREDLLR
KQRTFDNGSIPHQIHLGELHAILRRQEDFYPFLKDNREKIEKILTFRIPY
YVGPLARGNSRFAWMTRKSEETITPWNFEEVVDKGASAQSFIERMTNFDK
NLPNEKVLPKHSLLYEYFTVYNELTKVKYVTEGMRKPAFLSGEQKKAIVD
LLFKTNRKVTVKQLKEDYFKKIECFDSVEISGVEDRFNASLGTYHDLLKI
IKDKDFLDNEENEDILEDIVLTLTLFEDREMIEERLKTYAHLFDDKVMKQ
LKRRRYTGWGRLSRKLINGIRDKQSGKTILDFLKSDGFANRNFMQLIHDD
SLTFKEDIQKAQVSGQGDSLHEHIANLAGSPAIKKGILQTVKVVDELVKV
MGRHKPENIVIEMARENQTTQKGQKNSRERMKRIEEGIKELGSQILKEHP
VENTQLQNEKLYLYYLQNGRDMYVDQELDINRLSDYDVDHIVPQSFLKDD
SIDNKVLTRSDKNRGKSDNVPSEEVVKKMKNYWRQLLNAKLITQRKFDNL
TKAERGGLSELDKAGFIKRQLVETRQITKHVAQILDSRMNTKYDENDKLI
REVKVITLKSKLVSDFRKDFQFYKVREINNYHHAHDAYLNAVVGTALIKK
YPKTAHAEIMALRQGGLVMQNYRLIDATLYVTFEPCVMCAGAMIHSRIGR
VVFGVRNAKTGAAGSLMDVLHYPGMNHRVEITEGILADECAALLCYFFRM
PRQVFNAQKKAQSSTDGSSGSETPGTSESATPESSGSEVEFSHEYWMRHA
LTLAKRARDEREVPVGAVLVLNNRVIGEGWNRAIGLHDPLESEFVYGDYK
VYDVRKMIAKSEQEIGKATAKYFFYSNIMNFFKTEITLANGEIRKRPLIE
TNGETGEIVWDKGRDFATVRKVLSMPQVNIVKKTEVQTGGFSKESILPKR
NSDKLIARKKDWDPKKYGGFDSPTVAYSVLVVAKVEKGKSKKLKSVKELL
GITIMERSSFEKNPIDFLEAKGYKEVKKDLIIKLPKYSLFELENGRKRML
ASAGELQKGNELALPSKYVNFLYLASHYEKLKGSPEDNEQKQLFVEQHKH
YLDEIIEQISEFSKRVILADANLDKVLSAYNKHRDKPIREQAENIIHLFT
LTNLGAPAAFKYFDTTIDRKRYTSTKEVLDATLIHQSITGLYETRIDLSQ
LGGD
127 TadA CP65ins 1016
MDKKYSIGLAIGTNSVGWAVITDEYKVPSKKFKVLGNTDRHSIKKNLIGA
LLFDSGETAEATRLKRTARRRYTRRKNRICYLQEIFSNEMAKVDDSFFHR
LEESFLVEEDKKHERHPIFGNIVDEVAYHEKYPTIYHLRKKLVDSTDKAD
LRLIYLALAHMIKFRGHFLIEGDLNPDNSDVDKLFIQLVQTYNQLFEENP
INASGVDAKAILSARLSKSRRLENLIAQLPGEKKNGLFGNLIALSLGLTP
NFKSNFDLAEDAKLQLSKDTYDDDLDNLLAQIGDQYADLFLAAKNLSDAI
LLSDILRVNTEITKAPLSASMIKRYDEHHQDLTLLKALVRQQLPEKYKEI
FFDQSKNGYAGYIDGGASQEEFYKFIKPILEKMDGTEELLVKLNREDLLR
KQRTFDNGSIPHQIHLGELHAILRRQEDFYPFLKDNREKIEKILTFRIPY
YVGPLARGNSRFAWMTRKSEETITPWNFEEVVDKGASAQSFIERMTNFDK
NLPNEKVLPKHSLLYEYFTVYNELTKVKYVTEGMRKPAFLSGEQKKAIVD
LLFKTNRKVTVKQLKEDYFKKIECFDSVEISGVEDRFNASLGTYHDLLKI
IKDKDFLDNEENEDILEDIVLTLTLFEDREMIEERLKTYAHLFDDKVMKQ
LKRRRYTGWGRLSRKLINGIRDKQSGKTILDFLKSDGFANRNFMQLIHDD
SLTFKEDIQKAQVSGQGDSLHEHIANLAGSPAIKKGILQTVKVVDELVKV
MGRHKPENIVIEMARENQTTQKGQKNSRERMKRIEEGIKELGSQILKEHP
VENTQLQNEKLYLYYLQNGRDMYVDQELDINRLSDYDVDHIVPQSFLKDD
SIDNKVLTRSDKNRGKSDNVPSEEVVKKMKNYWRQLLNAKLITQRKFDNL
TKAERGGLSELDKAGFIKRQLVETRQITKHVAQILDSRMNTKYDENDKLI
REVKVITLKSKLVSDFRKDFQFYKVREINNYHHAHDAYLNAVVGTALIKK
YPKLESEFVYGDYKVTAHAEIMALRQGGLVMQNYRLIDATLYVTFEPCVM
CAGAMIHSRIGRVVFGVRNAKTGAAGSLMDVLHYPGMNHRVEITEGILAD
ECAALLCYFFRMPRQVFNAQKKAQSSTDGSSGSETPGTSESATPESSGSE
VEFSHEYWMRHALTLAKRARDEREVPVGAVLVLNNRVIGEGWNRAIGLHD
PYDVRKMIAKSEQEIGKATAKYFFYSNIMNFFKTEITLANGEIRKRPLIE
TNGETGEIVWDKGRDFATVRKVLSMPQVNIVKKTEVQTGGFSKESILPKR
NSDKLIARKKDWDPKKYGGFDSPTVAYSVLVVAKVEKGKSKKLKSVKELL
GITIMERSSFEKNPIDFLEAKGYKEVKKDLIIKLPKYSLFELENGRKRML
ASAGELQKGNELALPSKYVNFLYLASHYEKLKGSPEDNEQKQLFVEQHKH
YLDEIIEQISEFSKRVILADANLDKVLSAYNKHRDKPIREQAENIIHLFT
LTNLGAPAAFKYFDTTIDRKRYTSTKEVLDATLIHQSITGLYETRIDLSQ
LGGD
128 TadA CP65ins 1022
MDKKYSIGLAIGTNSVGWAVITDEYKVPSKKFKVLGNTDRHSIKKNLIGA
LLFDSGETAEATRLKRTARRRYTRRKNRICYLQEIFSNEMAKVDDSFFHR
LEESFLVEEDKKHERHPIFGNIVDEVAYHEKYPTIYHLRKKLVDSTDKAD
LRLIYLALAHMIKFRGHFLIEGDLNPDNSDVDKLFIQLVQTYNQLFEENP
INASGVDAKAILSARLSKSRRLENLIAQLPGEKKNGLFGNLIALSLGLTP
NFKSNFDLAEDAKLQLSKDTYDDDLDNLLAQIGDQYADLFLAAKNLSDAI
LLSDILRVNTEITKAPLSASMIKRYDEHHQDLTLLKALVRQQLPEKYKEI
FFDQSKNGYAGYIDGGASQEEFYKFIKPILEKMDGTEELLVKLNREDLLR
KQRTFDNGSIPHQIHLGELHAILRRQEDFYPFLKDNREKIEKILTFRIPY
YVGPLARGNSRFAWMTRKSEETITPWNFEEVVDKGASAQSFIERMTNFDK
NLPNEKVLPKHSLLYEYFTVYNELTKVKYVTEGMRKPAFLSGEQKKAIVD
LLFKTNRKVTVKQLKEDYFKKIECFDSVEISGVEDRFNASLGTYHDLLKI
IKDKDFLDNEENEDILEDIVLTLTLFEDREMIEERLKTYAHLFDDKVMKQ
LKRRRYTGWGRLSRKLINGIRDKQSGKTILDFLKSDGFANRNFMQLIHDD
SLTFKEDIQKAQVSGQGDSLHEHIANLAGSPAIKKGILQTVKVVDELVKV
MGRHKPENIVIEMARENQTTQKGQKNSRERMKRIEEGIKELGSQILKEHP
VENTQLQNEKLYLYYLQNGRDMYVDQELDINRLSDYDVDHIVPQSFLKDD
SIDNKVLTRSDKNRGKSDNVPSEEVVKKMKNYWRQLLNAKLITQRKFDNL
TKAERGGLSELDKAGFIKRQLVETRQITKHVAQILDSRMNTKYDENDKLI
REVKVITLKSKLVSDFRKDFQFYKVREINNYHHAHDAYLNAVVGTALIKK
YPKLESEFVYGDYKVYDVRKMITAHAEIMALRQGGLVMQNYRLIDATLYV
TFEPCVMCAGAMIHSRIGRVVFGVRNAKTGAAGSLMDVLHYPGMNHRVEI
TEGILADECAALLCYFFRMPRQVFNAQKKAQSSTDGSSGSETPGTSESAT
PESSGSEVEFSHEYWMRHALTLAKRARDEREVPVGAVLVLNNRVIGEGWN
RAIGLHDPAKSEQEIGKATAKYFFYSNIMNFFKTEITLANGEIRKRPLIE
TNGETGEIVWDKGRDFATVRKVLSMPQVNIVKKTEVQTGGFSKESILPKR
NSDKLIARKKDWDPKKYGGFDSPTVAYSVLVVAKVEKGKSKKLKSVKELL
GITIMERSSFEKNPIDFLEAKGYKEVKKDLIIKLPKYSLFELENGRKRML
ASAGELQKGNELALPSKYVNFLYLASHYEKLKGSPEDNEQKQLFVEQHKH
YLDEIIEQISEFSKRVILADANLDKVLSAYNKHRDKPIREQAENIIHLFT
LTNLGAPAAFKYFDTTIDRKRYTSTKEVLDATLIHQSITGLYETRIDLSQ
LGGD
129 TadA CP65ins 1029
MDKKYSIGLAIGTNSVGWAVITDEYKVPSKKFKVLGNTDRHSIKKNLIGA
LLFDSGETAEATRLKRTARRRYTRRKNRICYLQEIFSNEMAKVDDSFFHR
LEESFLVEEDKKHERHPIFGNIVDEVAYHEKYPTIYHLRKKLVDSTDKAD
LRLIYLALAHMIKFRGHFLIEGDLNPDNSDVDKLFIQLVQTYNQLFEENP
INASGVDAKAILSARLSKSRRLENLIAQLPGEKKNGLFGNLIALSLGLTP
NFKSNFDLAEDAKLQLSKDTYDDDLDNLLAQIGDQYADLFLAAKNLSDAI
LLSDILRVNTEITKAPLSASMIKRYDEHHQDLTLLKALVRQQLPEKYKEI
FFDQSKNGYAGYIDGGASQEEFYKFIKPILEKMDGTEELLVKLNREDLLR
KQRTFDNGSIPHQIHLGELHAILRRQEDFYPFLKDNREKIEKILTFRIPY
YVGPLARGNSRFAWMTRKSEETITPWNFEEVVDKGASAQSFIERMTNFDK
NLPNEKVLPKHSLLYEYFTVYNELTKVKYVTEGMRKPAFLSGEQKKAIVD
LLFKTNRKVTVKQLKEDYFKKIECFDSVEISGVEDRFNASLGTYHDLLKI
IKDKDFLDNEENEDILEDIVLTLTLFEDREMIEERLKTYAHLFDDKVMKQ
LKRRRYTGWGRLSRKLINGIRDKQSGKTILDFLKSDGFANRNFMQLIHDD
SLTFKEDIQKAQVSGQGDSLHEHIANLAGSPAIKKGILQTVKVVDELVKV
MGRHKPENIVIEMARENQTTQKGQKNSRERMKRIEEGIKELGSQILKEHP
VENTQLQNEKLYLYYLQNGRDMYVDQELDINRLSDYDVDHIVPQSFLKDD
SIDNKVLTRSDKNRGKSDNVPSEEVVKKMKNYWRQLLNAKLITQRKFDNL
TKAERGGLSELDKAGFIKRQLVETRQITKHVAQILDSRMNTKYDENDKLI
REVKVITLKSKLVSDFRKDFQFYKVREINNYHHAHDAYLNAVVGTALIKK
YPKLESEFVYGDYKVYDVRKMIAKSEQEITAHAEIMALRQGGLVMQNYRL
IDATLYVTFEPCVMCAGAMIHSRIGRVVFGVRNAKTGAAGSLMDVLHYPG
MNHRVEITEGILADECAALLCYFFRMPRQVFNAQKKAQSSTDGSSGSETP
GTSESATPESSGSEVEFSHEYWMRHALTLAKRARDEREVPVGAVLVLNNR
VIGEGWNRAIGLHDPGKATAKYFFYSNIMNFFKTEITLANGEIRKRPLIE
TNGETGEIVWDKGRDFATVRKVLSMPQVNIVKKTEVQTGGFSKESILPKR
NSDKLIARKKDWDPKKYGGFDSPTVAYSVLVVAKVEKGKSKKLKSVKELL
GITIMERSSFEKNPIDFLEAKGYKEVKKDLIIKLPKYSLFELENGRKRML
ASAGELQKGNELALPSKYVNFLYLASHYEKLKGSPEDNEQKQLFVEQHKH
YLDEIIEQISEFSKRVILADANLDKVLSAYNKHRDKPIREQAENIIHLFT
LTNLGAPAAFKYFDTTIDRKRYTSTKEVLDATLIHQSITGLYETRIDLSQ
LGGD
130 TadA CP65ins 1041
MDKKYSIGLAIGTNSVGWAVITDEYKVPSKKFKVLGNTDRHSIKKNLIGA
LLFDSGETAEATRLKRTARRRYTRRKNRICYLQEIFSNEMAKVDDSFFHR
LEESFLVEEDKKHERHPIFGNIVDEVAYHEKYPTIYHLRKKLVDSTDKAD
LRLIYLALAHMIKFRGHFLIEGDLNPDNSDVDKLFIQLVQTYNQLFEENP
INASGVDAKAILSARLSKSRRLENLIAQLPGEKKNGLFGNLIALSLGLTP
NFKSNFDLAEDAKLQLSKDTYDDDLDNLLAQIGDQYADLFLAAKNLSDAI
LLSDILRVNTEITKAPLSASMIKRYDEHHQDLTLLKALVRQQLPEKYKEI
FFDQSKNGYAGYIDGGASQEEFYKFIKPILEKMDGTEELLVKLNREDLLR
KQRTFDNGSIPHQIHLGELHAILRRQEDFYPFLKDNREKIEKILTFRIPY
YVGPLARGNSRFAWMTRKSEETITPWNFEEVVDKGASAQSFIERMTNFDK
NLPNEKVLPKHSLLYEYFTVYNELTKVKYVTEGMRKPAFLSGEQKKAIVD
LLFKTNRKVTVKQLKEDYFKKIECFDSVEISGVEDRFNASLGTYHDLLKI
IKDKDFLDNEENEDILEDIVLTLTLFEDREMIEERLKTYAHLFDDKVMKQ
LKRRRYTGWGRLSRKLINGIRDKQSGKTILDFLKSDGFANRNFMQLIHDD
SLTFKEDIQKAQVSGQGDSLHEHIANLAGSPAIKKGILQTVKVVDELVKV
MGRHKPENIVIEMARENQTTQKGQKNSRERMKRIEEGIKELGSQILKEHP
VENTQLQNEKLYLYYLQNGRDMYVDQELDINRLSDYDVDHIVPQSFLKDD
SIDNKVLTRSDKNRGKSDNVPSEEVVKKMKNYWRQLLNAKLITQRKFDNL
TKAERGGLSELDKAGFIKRQLVETRQITKHVAQILDSRMNTKYDENDKLI
REVKVITLKSKLVSDFRKDFQFYKVREINNYHHAHDAYLNAVVGTALIKK
YPKLESEFVYGDYKVYDVRKMIAKSEQEIGKATAKYFFYSTAHAEIMALR
QGGLVMQNYRLIDATLYVTFEPCVMCAGAMIHSRIGRVVFGVRNAKTGAA
GSLMDVLHYPGMNHRVEITEGILADECAALLCYFFRMPRQVFNAQKKAQS
STDGSSGSETPGTSESATPESSGSEVEFSHEYWMRHALTLAKRARDEREV
PVGAVLVLNNRVIGEGWNRAIGLHDPNIMNFFKTEITLANGEIRKRPLIE
TNGETGEIVWDKGRDFATVRKVLSMPQVNIVKKTEVQTGGFSKESILPKR
NSDKLIARKKDWDPKKYGGFDSPTVAYSVLVVAKVEKGKSKKLKSVKELL
GITIMERSSFEKNPIDFLEAKGYKEVKKDLIIKLPKYSLFELENGRKRML
ASAGELQKGNELALPSKYVNFLYLASHYEKLKGSPEDNEQKQLFVEQHKH
YLDEIIEQISEFSKRVILADANLDKVLSAYNKHRDKPIREQAENIIHLFT
LTNLGAPAAFKYFDTTIDRKRYTSTKEVLDATLIHQSITGLYETRIDLSQ
LGGD
131 TadA CP65ins 1054
MDKKYSIGLAIGTNSVGWAVITDEYKVPSKKFKVLGNTDRHSIKKNLIGA
LLFDSGETAEATRLKRTARRRYTRRKNRICYLQEIFSNEMAKVDDSFFHR
LEESFLVEEDKKHERHPIFGNIVDEVAYHEKYPTIYHLRKKLVDSTDKAD
LRLIYLALAHMIKFRGHFLIEGDLNPDNSDVDKLFIQLVQTYNQLFEENP
INASGVDAKAILSARLSKSRRLENLIAQLPGEKKNGLFGNLIALSLGLTP
NFKSNFDLAEDAKLQLSKDTYDDDLDNLLAQIGDQYADLFLAAKNLSDAI
LLSDILRVNTEITKAPLSASMIKRYDEHHQDLTLLKALVRQQLPEKYKEI
FFDQSKNGYAGYIDGGASQEEFYKFIKPILEKMDGTEELLVKLNREDLLR
KQRTFDNGSIPHQIHLGELHAILRRQEDFYPFLKDNREKIEKILTFRIPY
YVGPLARGNSRFAWMTRKSEETITPWNFEEVVDKGASAQSFIERMTNFDK
NLPNEKVLPKHSLLYEYFTVYNELTKVKYVTEGMRKPAFLSGEQKKAIVD
LLFKTNRKVTVKQLKEDYFKKIECFDSVEISGVEDRFNASLGTYHDLLKI
IKDKDFLDNEENEDILEDIVLTLTLFEDREMIEERLKTYAHLFDDKVMKQ
LKRRRYTGWGRLSRKLINGIRDKQSGKTILDFLKSDGFANRNFMQLIHDD
SLTFKEDIQKAQVSGQGDSLHEHIANLAGSPAIKKGILQTVKVVDELVKV
MGRHKPENIVIEMARENQTTQKGQKNSRERMKRIEEGIKELGSQILKEHP
VENTQLQNEKLYLYYLQNGRDMYVDQELDINRLSDYDVDHIVPQSFLKDD
SIDNKVLTRSDKNRGKSDNVPSEEVVKKMKNYWRQLLNAKLITQRKFDNL
TKAERGGLSELDKAGFIKRQLVETRQITKHVAQILDSRMNTKYDENDKLI
REVKVITLKSKLVSDFRKDFQFYKVREINNYHHAHDAYLNAVVGTALIKK
YPKLESEFVYGDYKVYDVRKMIAKSEQEIGKATAKYFFYSNIMNFFKTEI
TLANTAHAEIMALRQGGLVMQNYRLIDATLYVTFEPCVMCAGAMIHSRIG
RVVFGVRNAKTGAAGSLMDVLHYPGMNHRVEITEGILADECAALLCYFFR
MPRQVFNAQKKAQSSTDGSSGSETPGTSESATPESSGSEVEFSHEYWMRH
ALTLAKRARDEREVPVGAVLVLNNRVIGEGWNRAIGLHDPGEIRKRPLIE
TNGETGEIVWDKGRDFATVRKVLSMPQVNIVKKTEVQTGGFSKESILPKR
NSDKLIARKKDWDPKKYGGFDSPTVAYSVLVVAKVEKGKSKKLKSVKELL
GITIMERSSFEKNPIDFLEAKGYKEVKKDLIIKLPKYSLFELENGRKRML
ASAGELQKGNELALPSKYVNFLYLASHYEKLKGSPEDNEQKQLFVEQHKH
YLDEIIEQISEFSKRVILADANLDKVLSAYNKHRDKPIREQAENIIHLFT
LTNLGAPAAFKYFDTTIDRKRYTSTKEVLDATLIHQSITGLYETRIDLSQ
LGGD
132 TadA CP65ins 1246
MDKKYSIGLAIGTNSVGWAVITDEYKVPSKKFKVLGNTDRHSIKKNLIGA
LLFDSGETAEATRLKRTARRRYTRRKNRICYLQEIFSNEMAKVDDSFFHR
LEESFLVEEDKKHERHPIFGNIVDEVAYHEKYPTIYHLRKKLVDSTDKAD
LRLIYLALAHMIKFRGHFLIEGDLNPDNSDVDKLFIQLVQTYNQLFEENP
INASGVDAKAILSARLSKSRRLENLIAQLPGEKKNGLFGNLIALSLGLTP
NFKSNFDLAEDAKLQLSKDTYDDDLDNLLAQIGDQYADLFLAAKNLSDAI
LLSDILRVNTEITKAPLSASMIKRYDEHHQDLTLLKALVRQQLPEKYKEI
FFDQSKNGYAGYIDGGASQEEFYKFIKPILEKMDGTEELLVKLNREDLLR
KQRTFDNGSIPHQIHLGELHAILRRQEDFYPFLKDNREKIEKILTFRIPY
YVGPLARGNSRFAWMTRKSEETITPWNFEEVVDKGASAQSFIERMTNFDK
NLPNEKVLPKHSLLYEYFTVYNELTKVKYVTEGMRKPAFLSGEQKKAIVD
LLFKTNRKVTVKQLKEDYFKKIECFDSVEISGVEDRFNASLGTYHDLLKI
IKDKDFLDNEENEDILEDIVLTLTLFEDREMIEERLKTYAHLFDDKVMKQ
LKRRRYTGWGRLSRKLINGIRDKQSGKTILDFLKSDGFANRNFMQLIHDD
SLTFKEDIQKAQVSGQGDSLHEHIANLAGSPAIKKGILQTVKVVDELVKV
MGRHKPENIVIEMARENQTTQKGQKNSRERMKRIEEGIKELGSQILKEHP
VENTQLQNEKLYLYYLQNGRDMYVDQELDINRLSDYDVDHIVPQSFLKDD
SIDNKVLTRSDKNRGKSDNVPSEEVVKKMKNYWRQLLNAKLITQRKFDNL
TKAERGGLSELDKAGFIKRQLVETRQITKHVAQILDSRMNTKYDENDKLI
REVKVITLKSKLVSDFRKDFQFYKVREINNYHHAHDAYLNAVVGTALIKK
YPKLESEFVYGDYKVYDVRKMIAKSEQEIGKATAKYFFYSNIMNFFKTEI
TLANGEIRKRPLIETNGETGEIVWDKGRDFATVRKVLSMPQVNIVKKTEV
QTGGFSKESILPKRNSDKLIARKKDWDPKKYGGFDSPTVAYSVLVVAKVE
KGKSKKLKSVKELLGITIMERSSFEKNPIDFLEAKGYKEVKKDLIIKLPK
YSLFELENGRKRMLASAGELQKGNELALPSKYVNFLYLASHYEKLKGTAH
AEIMALRQGGLVMQNYRLIDATLYVTFEPCVMCAGAMIHSRIGRVVFGVR
NAKTGAAGSLMDVLHYPGMNHRVEITEGILADECAALLCYFFRMPRQVFN
AQKKAQSSTDGSSGSETPGTSESATPESSGSEVEFSHEYWMRHALTLAKR
ARDEREVPVGAVLVLNNRVIGEGWNRAIGLHDPSPEDNEQKQLFVEQHKH
YLDEIIEQISEFSKRVILADANLDKVLSAYNKHRDKPIREQAENIIHLFT
LTNLGAPAAFKYFDTTIDRKRYTSTKEVLDATLIHQSITGLYETRIDLSQ
LGGD

[0471] In some embodiments, adenosine deaminase base editors were generated to insert TadA or variants thereof into the Cas9 polypeptide at the identified positions.

[0472] Exemplary, yet nonlimiting, fusion proteins are described in International PCT Application Nos. PCT/US2020/016285 and U.S. Provisional Application Nos. 62/852,228 and 62/852,224, the contents of which are incorporated by reference herein in their entireties.

### Nucleobase Editing Domain

[0473] Described herein are base editors comprising a fusion protein that includes a polynucleotide programmable nucleotide binding domain and a nucleobase editing domain (e.g., a deaminase domain). The base editor can be programmed to edit one or more bases in a target polynucleotide sequence by interacting with a guide polynucleotide capable of recognizing the target sequence. Once the target sequence has been recognized, the base editor is anchored on the polynucleotide where editing is to occur and the deaminase domain components of the base editor can then edit a target base.

[0474] In some embodiments, the nucleobase editing domain includes a deaminase domain. As particularly described herein, the deaminase domain includes a cytosine deaminase or an adenosine deaminase. In some embodiments, the terms “cytosine deaminase” and “cytidine deaminase” can be used interchangeably. In some embodiments, the terms “adenine deaminase” and “adenosine deaminase” can be used interchangeably. Details of nucleobase editing proteins are described in International PCT Application Nos. PCT/2017/045381 (WO2018/027078) and PCT/US2016/058344 (WO2017/070632), each of which is incorporated herein by reference for its entirety. Also see Komor, A. C., et al., “Programmable editing of a target base in genomic DNA without double-stranded DNA cleavage” Nature 533, 420-424 (2016); Gaudelli, N. M., et al., “Programmable base editing of A·T to G·C in genomic DNA without DNA cleavage” Nature 551, 464-471 (2017); and Komor, A. C., et al., “Improved base excision repair inhibition and bacteriophage Mu Gam protein yields C:G-to-T:A base editors with higher efficiency and product purity” Science Advances 3:eaao4774 (2017), the entire contents of which are hereby incorporated by reference.

### A to G Editing

[0475] In some embodiments, a base editor described herein can comprise a deaminase domain which includes an adenosine deaminase. Such an adenosine deaminase domain of a base editor can facilitate the editing of an adenine (A) nucleobase to a guanine (G) nucleobase by deaminating the A to form inosine (I), which exhibits base pairing properties of G. Adenosine deaminase is capable of deaminating (i.e., removing an amine group) adenine of a deoxyadenosine residue in deoxyribonucleic acid (DNA).

[0476] In some embodiments, the nucleobase editors provided herein can be made by fusing together one or more protein domains, thereby generating a fusion protein. In certain embodiments, the fusion proteins provided herein comprise one or more features that improve the base editing activity (e.g., efficiency, selectivity, and specificity) of the fusion proteins. For example, the fusion proteins provided herein can comprise a Cas9 domain that has reduced nuclease activity. In some embodiments, the fusion proteins provided herein can have a Cas9 domain that does not have nuclease activity (dCas9), or a Cas9 domain that cuts one strand of a duplexed DNA molecule, referred to as a Cas9 nickase (nCas9). Without wishing to be bound by any particular theory, the presence of the catalytic residue (e.g., H840) maintains the activity of the Cas9 to cleave the non-edited (e.g., non-deaminated) strand containing a T opposite the targeted A. Mutation of the catalytic residue (e.g., D10 to A10) of Cas9 prevents cleavage of the edited strand containing the targeted A residue. Such Cas9 variants are able to generate a single-strand DNA break (nick) at a specific location based on the gRNA-defined target sequence, leading to repair of the non-edited strand, ultimately resulting in a T to C change on the non-edited strand. In some embodiments, an A-to-G base editor further comprises an inhibitor of inosine base excision repair, for example, a uracil glycosylase inhibitor (UGI) domain or a catalytically inactive inosine specific nuclease. Without wishing to be bound by any particular theory, the UGI domain or catalytically inactive inosine specific nuclease can inhibit or prevent base excision repair of a deaminated adenosine residue (e.g., inosine), which can improve the activity or efficiency of the base editor.

[0477] A base editor comprising an adenosine deaminase can act on any polynucleotide, including DNA, RNA and DNA-RNA hybrids. In certain embodiments, a base editor comprising an adenosine deaminase can deaminate a target A of a polynucleotide comprising RNA. For example, the base editor can comprise an adenosine deaminase domain capable of deaminating a target A of an RNA polynucleotide and/or a DNA-RNA hybrid polynucleotide. In an embodiment, an adenosine deaminase incorporated into a base editor comprises all or a portion of adenosine deaminase acting on RNA (ADAR, e.g., ADAR1 or ADAR2). In another embodiment, an adenosine deaminase incorporated into a base editor comprises all or a portion of adenosine deaminase acting on tRNA (ADAT). A base editor comprising an adenosine deaminase domain can also be capable of deaminating an A nucleobase of a DNA polynucleotide. In an embodiment an adenosine deaminase domain of a base editor comprises all or a portion of an ADAT comprising one or more mutations which permit the ADAT to deaminate a target A in DNA. For example, the base editor can comprise all or a portion of an ADAT from Escherichia coli (EcTadA) comprising one or more of the following mutations: D108N, A106V, D147Y, E155V, L84F, H123Y, I156F, or a corresponding mutation in another adenosine deaminase.

[0478] The adenosine deaminase can be derived from any suitable organism (e.g., E. coli). In some embodiments, the adenine deaminase is a naturally-occurring adenosine deaminase that includes one or more mutations corresponding to any of the mutations provided herein (e.g., mutations in ecTadA). The corresponding residue in any homologous protein can be identified by e.g., sequence alignment and determination of homologous residues. The mutations in any naturally-occurring adenosine deaminase (e.g., having homology to ecTadA) that corresponds to any of the mutations described herein (e.g., any of the mutations identified in ecTadA) can be generated accordingly.

### Adenosine Deaminases

[0479] In some embodiments, fusion proteins described herein can comprise a deaminase domain which includes an adenosine deaminase. Such an adenosine deaminase domain of a base editor can facilitate the editing of an adenine (A) nucleobase to a guanine (G) nucleobase by deaminating the A to form inosine (I), which exhibits base pairing properties of G. Adenosine deaminase is capable of deaminating (i.e., removing an amine group) adenine of a deoxyadenosine residue in deoxyribonucleic acid (DNA).

[0480] In some embodiments, the adenosine deaminases provided herein are capable of deaminating adenine. In some embodiments, the adenosine deaminases provided herein are capable of deaminating adenine in a deoxyadenosine residue of DNA. In some embodiments, the adenine deaminase is a naturally-occurring adenosine deaminase that includes one or more mutations corresponding to any of the mutations provided herein (e.g., mutations in ecTadA). One of skill in the art will be able to identify the corresponding residue in any homologous protein, e.g., by sequence alignment and determination of homologous residues. Accordingly, one of skill in the art would be able to generate mutations in any naturally-occurring adenosine deaminase (e.g., having homology to ecTadA) that corresponds to any of the mutations described herein, e.g., any of the mutations identified in ecTadA. In some embodiments, the adenosine deaminase is from a prokaryote. In some embodiments, the adenosine deaminase is from a bacterium. In some embodiments, the adenosine deaminase is from Escherichia coli, Staphylococcus aureus, Salmonella typhi, Shewanella putrefaciens, Haemophilus influenzae, Caulobacter crescentus, or Bacillus subtilis. In some embodiments, the adenosine deaminase is from E. coli.

[0481] The disclosure provides adenosine deaminase variants that have increased efficiency (>50-60%) and specificity. In particular, the adenosine deaminase variants described herein are more likely to edit a desired base within a polynucleotide, and are less likely to edit bases that are not intended to be altered (i.e., “bystanders”).

[0482] In particular embodiments, the TadA is any one of the TadA described in PCT/US2017/045381 (WO 2018/027078), which is incorporated herein by reference in its entirety.

[0483] In some embodiments, the nucleobase editors of the disclosure are adenosine deaminase variants comprising an alteration in the following sequence:

MSEVEFSHEYWMRHALTLAKRARDEREVPVGAVLVLNNRVIGEGWNRAIG
LHDPTAHAEIMALRQGGLVMQNYRLIDATLYVTFEPCVMCAGAMIHSRIG
RVVFGVRNAKTGAAGSLMDVLHYPGMNHRVEITEGILADECAALLCYFFR
MPRQVFNAQKKAQSSTD(also termed TadA*7.10).

[0484] In particular embodiments, the fusion proteins comprise a single (e.g., provided as a monomer) TadA*8 variant. In some embodiments, the TadA*8 is linked to a Cas9 nickase. In some embodiments, the fusion proteins of the disclosure comprise as a heterodimer of a wild-type TadA (TadA(wt)) linked to a TadA*8 variant. In other embodiments, the fusion proteins of the disclosure comprise as a heterodimer of a TadA*7.10 linked to a TadA*8 variant. In some embodiments, the base editor is ABE8 comprising a TadA*8 variant monomer. In some embodiments, the base editor is ABE8 comprising a heterodimer of a TadA*8 variant and a TadA(wt). In some embodiments, the base editor is ABE8 comprising a heterodimer of a TadA*8 variant and TadA*7.10. In some embodiments, the base editor is ABE8 comprising a heterodimer of a TadA*8 variant. In some embodiments, the TadA*8 variant is selected from Table 8. In some embodiments, the ABE8 is selected from Table 8, 9, or 10. The relevant sequences follow:

Wild-type TadA (TadA(wt)) or “the TadA reference
sequence”
MSEVEFSHEYWMRHALTLAKRAWDEREVPVGAVLVHNNRVIGEGWNRPIG
RHDPTAHAEIMALRQGGLVMQNYRLIDATLYVTLEPCVMCAGAMIHSRIG
RVVFGARDAKTGAAGSLMDVLHHPGMNHRVEITEGILADECAALLSDFFR
MRRQEIKAQKKAQSSTD
TadA*7.10:
MSEVEFSHEYW MRHALTLAKR ARDEREVPVG AVLVLNNRVI
GEGWNRAIGL HDPTAHAEIM ALRQGGLVMQ NYRLIDATLY
VTFEPCVMCA GAMIHSRIGR VVFGVRNAKT GAAGSLMDVL
HYPGMNHRVE ITEGILADEC AALLCYFFRM PRQVFNAQKK
AQSSTD

[0485] In some embodiments, the adenosine deaminase comprises an amino acid sequence that is at least 60%, at least 65%, at least 70%, at least 75%, at least 80%, at least 85%, at least 90%, at least 95%, at least 96%, at least 97%, at least 98%, at least 99%, or at least 99.5% identical to any one of the amino acid sequences set forth in any of the adenosine deaminases provided herein. It should be appreciated that adenosine deaminases provided herein may include one or more mutations (e.g., any of the mutations provided herein). The disclosure provides any deaminase domains with a certain percent identity plus any of the mutations or combinations thereof described herein. In some embodiments, the adenosine deaminase comprises an amino acid sequence that has 1, 2, 3, 4, 5, 6, 7, 8, 9, 10, 11, 12, 13, 14, 15, 16, 17, 18, 19, 20, 21, 22, 21, 24, 25, 26, 27, 28, 29, 30, 31, 32, 33, 34, 35, 36, 37, 38, 39, 40, 41, 42, 43, 44, 45, 46, 47, 48, 49, 50, or more mutations compared to a reference sequence, or any of the adenosine deaminases provided herein. In some embodiments, the adenosine deaminase comprises an amino acid sequence that has at least 5, at least 10, at least 15, at least 20, at least 25, at least 30, at least 35, at least 40, at least 45, at least 50, at least 60, at least 70, at least 80, at least 90, at least 100, at least 110, at least 120, at least 130, at least 140, at least 150, at least 160, or at least 170 identical contiguous amino acid residues as compared to any one of the amino acid sequences known in the art or described herein.

[0486] In some embodiments the TadA deaminase is a full-length E. coli TadA deaminase. For example, in certain embodiments, the adenosine deaminase comprises the amino acid sequence:

MRRAFITGVFFLSEVEFSHEYWMRHALTLAKRAWDEREVPVGAVLVHNNR
VIGEGWNRPIGRHDPTAHAEIMALRQGGLVMQNYRLIDATLYVTLEPCVM
CAGAMIHSRIGRVVFGARDAKTGAAGSLMDVLHHPGMNHRVEITEGILAD
ECAALLSDFFRMRRQEIKAQKKAQSSTD.

[0487] It should be appreciated, however, that additional adenosine deaminases useful in the present application would be apparent to the skilled artisan and are within the scope of this disclosure. For example, the adenosine deaminase may be a homolog of adenosine deaminase acting on tRNA (ADAT). Without limitation, the amino acid sequences of exemplary AD AT homologs include the following:

Staphylococcus aureus TadA:
MGSHMTNDIYFMTLAIEEAKKAAQLGEVPIGAIITKDDEVIARAHNLRET
LQQPTAHAEHIAIERAAKVLGSWRLEGCTLYVTLEPCVMCAGTIVMSRIP
RVVYGADDPKGGCSGSLMNLLQQSNFNHRAIVDKGVLKEACSTLLTTFFK
NLRANKKSTN
Bacillus subtilis TadA:
MTQDELYMKEAIKEAKKAEEKGEVPIGAVLVINGEIIARAHNLRETEQRS
IAHAEMLVIDEACKALGTWRLEGATLYVTLEPCPMCAGAVVLSRVEKVVF
GAFDPKGGCSGTLMNLLQEERFNHQAEVVSGVLEEECGGMLSAFFRELRK
KKKAARKNLSE
Salmonella typhimurium (S. typhimurium) TadA:
MPPAFITGVTSLSDVELDHEYWMRHALTLAKRAWDEREVPVGAVLVHNHR
VIGEGWNRPIGRHDPTAHAEIMALRQGGLVLQNYRLLDTTLYVTLEPCVM
CAGAMVHSRIGRVVFGARDAKTGAAGSLIDVLHHPGMNHRVEIIEGVLRD
ECATLLSDFFRMRRQEIKALKKADRAEGAGPAV
Shewanella putrefaciens (S. putrefaciens) TadA:
MDEYWMQVAMQMAEKAEAAGEVPVGAVLVKDGQQIATGYNLSISQHDPTA
HAEILCLRSAGKKLENYRLLDATLYITLEPCAMCAGAMVHSRIARVVYGA
RDEKTGAAGTVVNLLQHPAFNHQVEVTSGVLAEACSAQLSRFFKRRRDEK
KALKLAQRAQQGIE
Haemophilus influenzae F3031 (H. influenzae) TadA:
MDAAKVRSEFDEKMMRYALELADKAEALGEIPVGAVLVDDARNIIGEGWN
LSIVQSDPTAHAEIIALRNGAKNIQNYRLLNSTLYVTLEPCTMCAGAILH
SRIKRLVFGASDYKTGAIGSRFHFFDDYKMNHTLEITSGVLAEECSQKLS
TFFQKRREEKKIEKALLKSLSDK
Caulobacter crescentus (C. crescentus) TadA:
MRTDESEDQDHRMMRLALDAARAAAEAGETPVGAVILDPSTGEVIATAGN
GPIAAHDPTAHAEIAAMRAAAAKLGNYRLTDLTLVVTLEPCAMCAGAISH
ARIGRVVFGADDPKGGAVVHGPKFFAQPTCHWRPEVTGGVLADESADLLR
GFFRARRKAKI
Geobacter sulfurreducens (G. sulfurreducens) TadA:
MSSLKKTPIRDDAYWMGKAIREAAKAAARDEVPIGAVIVRDGAVIGRGHN
LREGSNDPSAHAEMIAIRQAARRSANWRLTGATLYVTLEPCLMCMGAIIL
ARLERVVFGCYDPKGGAAGSLYDLSADPRLNHQVRLSPGVCQEECGTMLS
DFFRDLRRRKKAKATPALFIDERKVPPEP

An embodiment of E. Coli TadA (ecTadA) includes the following:

MSEVEFSHEYWMRHALTLAKRARDEREVPVGAVLVLNNRVIGEGWNRAIG
LHDPTAHAEIMALRQGGLVMQNYRLIDATLYVTFEPCVMCAGAMIHSRIG
RVVFGVRNAKTGAAGSLMDVLHYPGMNHRVEITEGILADECAALLCYFFR
MPRQVFNAQKKAQSSTD

[0488] In some embodiments, the adenosine deaminase is from a prokaryote. In some embodiments, the adenosine deaminase is from a bacterium. In some embodiments, the adenosine deaminase is from Escherichia coli, Staphylococcus aureus, Salmonella typhi, Shewanella putrefaciens, Haemophilus influenzae, Caulobacter crescentus, or Bacillus subtilis. In some embodiments, the adenosine deaminase is from E. coli.

[0489] In one embodiment, a fusion protein of the disclosure comprises a wild-type TadA linked to TadA*7.10, which is linked to Cas9 nickase. In particular embodiments, the fusion proteins comprise a single TadA*7.10 domain (e.g., provided as a monomer). In other embodiments, the ABE7.10 editor comprises TadA*7.10 and TadA(wt), which are capable of forming heterodimers.

[0490] In some embodiments, the adenosine deaminase comprises an amino acid sequence that is at least 60%, at least 65%, at least 70%, at least 75%, at least 80%, at least 85%, at least 90%, at least 95%, at least 96%, at least 97%, at least 98%, at least 99%, or at least 99.5% identical to any one of the amino acid sequences set forth in any of the adenosine deaminases provided herein. It should be appreciated that adenosine deaminases provided herein may include one or more mutations (e.g., any of the mutations provided herein). The disclosure provides any deaminase domains with a certain percent identity plus any of the mutations or combinations thereof described herein. In some embodiments, the adenosine deaminase comprises an amino acid sequence that has 1, 2, 3, 4, 5, 6, 7, 8, 9, 10, 11, 12, 13, 14, 15, 16, 17, 18, 19, 20, 21, 22, 21, 24, 25, 26, 27, 28, 29, 30, 31, 32, 33, 34, 35, 36, 37, 38, 39, 40, 41, 42, 43, 44, 45, 46, 47, 48, 49, 50, or more mutations compared to a reference sequence, or any of the adenosine deaminases provided herein. In some embodiments, the adenosine deaminase comprises an amino acid sequence that has at least 5, at least 10, at least 15, at least 20, at least 25, at least 30, at least 35, at least 40, at least 45, at least 50, at least 60, at least 70, at least 80, at least 90, at least 100, at least 110, at least 120, at least 130, at least 140, at least 150, at least 160, or at least 170 identical contiguous amino acid residues as compared to any one of the amino acid sequences known in the art or described herein.

[0491] It should be appreciated that any of the mutations provided herein (e.g., based on the TadA reference sequence) can be introduced into other adenosine deaminases, such as E. coli TadA (ecTadA), S. aureus TadA (saTadA), or other adenosine deaminases (e.g., bacterial adenosine deaminases). It would be apparent to the skilled artisan that additional deaminases may similarly be aligned to identify homologous amino acid residues that can be mutated as provided herein. Thus, any of the mutations identified in the TadA reference sequence can be made in other adenosine deaminases (e.g., ecTada) that have homologous amino acid residues. It should also be appreciated that any of the mutations provided herein can be made individually or in any combination in the TadA reference sequence or another adenosine deaminase.

[0492] In some embodiments, the adenosine deaminase comprises a D108X mutation in the TadA reference sequence, or a corresponding mutation in another adenosine deaminase (e.g., ecTadA), where X indicates any amino acid other than the corresponding amino acid in the wild-type adenosine deaminase. In some embodiments, the adenosine deaminase comprises a D108G, D108N, D108V, D108A, or D108Y mutation, or a corresponding mutation in another adenosine deaminase.

[0493] In some embodiments, the adenosine deaminase comprises an A106X mutation in TadA reference sequence, or a corresponding mutation in another adenosine deaminase (e.g., ecTadA), where X indicates any amino acid other than the corresponding amino acid in the wild-type adenosine deaminase. In some embodiments, the adenosine deaminase comprises an A106V mutation in TadA reference sequence, or a corresponding mutation in another adenosine deaminase (e.g., wild-type TadA or ecTadA).

[0494] In some embodiments, the adenosine deaminase comprises a E155X mutation in TadA reference sequence, or a corresponding mutation in another adenosine deaminase (e.g., ecTadA), where the presence of X indicates any amino acid other than the corresponding amino acid in the wild-type adenosine deaminase. In some embodiments, the adenosine deaminase comprises a E155D, E155G, or E155V mutation in TadA reference sequence, or a corresponding mutation in another adenosine deaminase (e.g., ecTadA).

[0495] In some embodiments, the adenosine deaminase comprises a D147X mutation in TadA reference sequence, or a corresponding mutation in another adenosine deaminase (e.g., ecTadA), where the presence of X indicates any amino acid other than the corresponding amino acid in the wild-type adenosine deaminase. In some embodiments, the adenosine deaminase comprises a D147Y, mutation in TadA reference sequence, or a corresponding mutation in another adenosine deaminase (e.g., ecTadA).

[0496] In some embodiments, the adenosine deaminase comprises an A106X, E155X, or D147X, mutation in the TadA reference sequence, or a corresponding mutation in another adenosine deaminase (e.g., ecTadA), where X indicates any amino acid other than the corresponding amino acid in the wild-type adenosine deaminase. In some embodiments, the adenosine deaminase comprises an E155D, E155G, or E155V mutation. In some embodiments, the adenosine deaminase comprises a D147Y.

[0497] For example, an adenosine deaminase can contain a D108N, a A106V, a E155V, and/or a D147Y mutation in TadA reference sequence, or a corresponding mutation in another adenosine deaminase (e.g., ecTadA). In some embodiments, an adenosine deaminase comprises the following group of mutations (groups of mutations are separated by a “;”) in TadA reference sequence, or corresponding mutations in another adenosine deaminase (e.g., ecTadA): D108N and A106V; D108N and E155V; D108N and D147Y; A106V and E155V; A106V and D147Y; E155V and D147Y; D108N, A106V, and E155V; D108N, A106V, and D147Y; D108N, E155V, and D147Y; A106V, E155V, and D147Y; and D108N, A106V, E155V, and D147Y. It should be appreciated, however, that any combination of corresponding mutations provided herein can be made in an adenosine deaminase (e.g., ecTadA).

[0498] In some embodiments, the adenosine deaminase comprises one or more of a H8X, T17X, L18X, W23X, L34X, W45X, R51X, A56X, E59X, E85X, M94X, I95X, V102X, F104X, A106X, R107X, D108X, K110X, M118X, N127X, A138X, F149X, M151X, R153X, Q154X, I156X, and/or K157X mutation in TadA reference sequence, or one or more corresponding mutations in another adenosine deaminase (e.g., ecTadA), where the presence of X indicates any amino acid other than the corresponding amino acid in the wild-type adenosine deaminase. In some embodiments, the adenosine deaminase comprises one or more of H8Y, T17S, L18E, W23L, L34S, W45L, R51H, A56E, or A56S, E59G, E85K, or E85G, M94L, I95L, V102A, F104L, A106V, R107C, or R107H, or R107P, D108G, or D108N, or D108V, or D108A, or D108Y, K110I, M118K, N127S, A138V, F149Y, M151V, R153C, Q154L, I156D, and/or K157R mutation in TadA reference sequence, or one or more corresponding mutations in another adenosine deaminase (e.g., ecTadA).

[0499] In some embodiments, the adenosine deaminase comprises one or more of a H8X, D108X, and/or N127X mutation in TadA reference sequence, or one or more corresponding mutations in another adenosine deaminase (e.g., ecTadA), where X indicates the presence of any amino acid. In some embodiments, the adenosine deaminase comprises one or more of a H8Y, D108N, and/or N127S mutation in TadA reference sequence, or one or more corresponding mutations in another adenosine deaminase (e.g., ecTadA).

[0500] In some embodiments, the adenosine deaminase comprises one or more of H8X, R26X, M61X, L68X, M70X, A106X, D108X, A109X, N127X, D147X, R152X, Q154X, E155X, K161X, Q163X, and/or T166X mutation in TadA reference sequence, or one or more corresponding mutations in another adenosine deaminase (e.g., ecTadA), where X indicates the presence of any amino acid other than the corresponding amino acid in the wild-type adenosine deaminase. In some embodiments, the adenosine deaminase comprises one or more of H8Y, R26W, M61I, L68Q, M70V, A106T, D108N, A109T, N127S, D147Y, R152C, Q154H or Q154R, E155G or E155V or E155D, K161Q, Q163H, and/or T166P mutation in TadA reference sequence, or one or more corresponding mutations in another adenosine deaminase (e.g., ecTadA).

[0501] In some embodiments, the adenosine deaminase comprises one, two, three, four, five, or six mutations selected from the group consisting of H8X, D108X, N127X, D147X, R152X, and Q154X in TadA reference sequence, or a corresponding mutation or mutations in another adenosine deaminase (e.g., ecTadA), where X indicates the presence of any amino acid other than the corresponding amino acid in the wild-type adenosine deaminase. In some embodiments, the adenosine deaminase comprises one, two, three, four, five, six, seven, or eight mutations selected from the group consisting of H8X, M61X, M70X, D108X, N127X, Q154X, E155X, and Q163X in TadA reference sequence, or a corresponding mutation or mutations in another adenosine deaminase (e.g., ecTadA), where X indicates the presence of any amino acid other than the corresponding amino acid in the wild-type adenosine deaminase. In some embodiments, the adenosine deaminase comprises one, two, three, four, or five, mutations selected from the group consisting of H8X, D108X, N127X, E155X, and T166X in TadA reference sequence, or a corresponding mutation or mutations in another adenosine deaminase (e.g., ecTadA), where X indicates the presence of any amino acid other than the corresponding amino acid in the wild-type adenosine deaminase.

[0502] In some embodiments, the adenosine deaminase comprises one, two, three, four, five, or six mutations selected from the group consisting of H8X, A106X, D108X, mutation or mutations in another adenosine deaminase, where X indicates the presence of any amino acid other than the corresponding amino acid in the wild-type adenosine deaminase. In some embodiments, the adenosine deaminase comprises one, two, three, four, five, six, seven, or eight mutations selected from the group consisting of H8X, R26X, L68X, D108X, N127X, D147X, and E155X, or a corresponding mutation or mutations in another adenosine deaminase, where X indicates the presence of any amino acid other than the corresponding amino acid in the wild-type adenosine deaminase. In some embodiments, the adenosine deaminase comprises one, two, three, four, or five, mutations selected from the group consisting of H8X, D108X, A109X, N127X, and E155X in TadA reference sequence, or a corresponding mutation or mutations in another adenosine deaminase (e.g., ecTadA), where X indicates the presence of any amino acid other than the corresponding amino acid in the wild-type adenosine deaminase.

[0503] In some embodiments, the adenosine deaminase comprises one, two, three, four, five, or six mutations selected from the group consisting of H8Y, D108N, N127S, D147Y, R152C, and Q154H in TadA reference sequence, or a corresponding mutation or mutations in another adenosine deaminase (e.g., ecTadA). In some embodiments, the adenosine deaminase comprises one, two, three, four, five, six, seven, or eight mutations selected from the group consisting of H8Y, M61I, M70V, D108N, N127S, Q154R, E155G and Q163H in TadA reference sequence, or a corresponding mutation or mutations in another adenosine deaminase (e.g., ecTadA). In some embodiments, the adenosine deaminase comprises one, two, three, four, or five, mutations selected from the group consisting of H8Y, D108N, N127S, E155V, and T166P in TadA reference sequence, or a corresponding mutation or mutations in another adenosine deaminase (e.g., ecTadA). In some embodiments, the adenosine deaminase comprises one, two, three, four, five, or six mutations selected from the group consisting of H8Y, A106T, D108N, N127S, E155D, and K161Q in TadA reference sequence, or a corresponding mutation or mutations in another adenosine deaminase (e.g., ecTadA). In some embodiments, the adenosine deaminase comprises one, two, three, four, five, six, seven, or eight mutations selected from the group consisting of H8Y, R26W, L68Q, D108N, N127S, D147Y, and E155V in TadA reference sequence, or a corresponding mutation or mutations in another adenosine deaminase (e.g., ecTadA). In some embodiments, the adenosine deaminase comprises one, two, three, four, or five, mutations selected from the group consisting of H8Y, D108N, A109T, N127S, and E155G in TadA reference sequence, or a corresponding mutation or mutations in another adenosine deaminase (e.g., ecTadA).

[0504] Any of the mutations provided herein and any additional mutations (e.g., based on the ecTadA amino acid sequence) can be introduced into any other adenosine deaminases. Any of the mutations provided herein can be made individually or in any combination in TadA reference sequence or another adenosine deaminase (e.g., ecTadA).

[0505] Details of A to G nucleobase editing proteins are described in International PCT Application No. PCT/2017/045381 (WO2018/027078) and Gaudelli, N. M., et al., “Programmable base editing of A·T to G·C in genomic DNA without DNA cleavage” Nature, 551, 464-471 (2017), the entire contents of which are hereby incorporated by reference.

[0506] In some embodiments, the adenosine deaminase comprises one or more corresponding mutations in another adenosine deaminase (e.g., ecTadA). In some embodiments, the adenosine deaminase comprises a D108N, D108G, or D108V mutation in TadA reference sequence, or corresponding mutations in another adenosine deaminase (e.g., ecTadA). In some embodiments, the adenosine deaminase comprises a A106V and D108N mutation in TadA reference sequence, or corresponding mutations in another adenosine deaminase (e.g., ecTadA). In some embodiments, the adenosine deaminase comprises R107C and D108N mutations in TadA reference sequence, or corresponding mutations in another adenosine deaminase (e.g., ecTadA). In some embodiments, the adenosine deaminase comprises a H8Y, D108N, N127S, D147Y, and Q154H mutation in TadA reference sequence, or corresponding mutations in another adenosine deaminase (e.g., ecTadA). In some embodiments, the adenosine deaminase comprises a H8Y, D108N, N127S, D147Y, and E155V mutation in TadA reference sequence, or corresponding mutations in another adenosine deaminase (e.g., ecTadA). In some embodiments, the adenosine deaminase comprises a D108N, D147Y, and E155V mutation in TadA reference sequence, or corresponding mutations in another adenosine deaminase (e.g., ecTadA). In some embodiments, the adenosine deaminase comprises a H8Y, D108N, and N127S mutation in TadA reference sequence, or corresponding mutations in another adenosine deaminase (e.g., ecTadA). In some embodiments, the adenosine deaminase comprises a A106V, D108N, D147Y and E155V mutation in TadA reference sequence, or corresponding mutations in another adenosine deaminase (e.g., ecTadA).

[0507] In some embodiments, the adenosine deaminase comprises one or more of a S2X, H8X, I49X, L84X, H123X, N127X, I156X and/or K160X mutation in TadA reference sequence, or one or more corresponding mutations in another adenosine deaminase, where the presence of X indicates any amino acid other than the corresponding amino acid in the wild-type adenosine deaminase. In some embodiments, the adenosine deaminase comprises one or more of S2A, H8Y, I49F, L84F, H123Y, N127S, I156F and/or K160S mutation in TadA reference sequence, or one or more corresponding mutations in another adenosine deaminase (e.g., ecTadA).

[0508] In some embodiments, the adenosine deaminase comprises an L84X mutation adenosine deaminase, where X indicates any amino acid other than the corresponding amino acid in the wild-type adenosine deaminase. In some embodiments, the adenosine deaminase comprises an L84F mutation in TadA reference sequence, or a corresponding mutation in another adenosine deaminase (e.g., ecTadA).

[0509] In some embodiments, the adenosine deaminase comprises an H123X mutation in TadA reference sequence, or a corresponding mutation in another adenosine deaminase (e.g., ecTadA), where X indicates any amino acid other than the corresponding amino acid in the wild-type adenosine deaminase. In some embodiments, the adenosine deaminase comprises an H123Y mutation in TadA reference sequence, or a corresponding mutation in another adenosine deaminase (e.g., ecTadA).

[0510] In some embodiments, the adenosine deaminase comprises an I156X mutation in TadA reference sequence, or a corresponding mutation in another adenosine deaminase (e.g., ecTadA), where X indicates any amino acid other than the corresponding amino acid in the wild-type adenosine deaminase. In some embodiments, the adenosine deaminase comprises an I156F mutation in TadA reference sequence, or a corresponding mutation in another adenosine deaminase (e.g., ecTadA).

[0511] In some embodiments, the adenosine deaminase comprises one, two, three, four, five, six, or seven mutations selected from the group consisting of L84X, A106X, D108X, H123X, D147X, E155X, and I156X in TadA reference sequence, or a corresponding mutation or mutations in another adenosine deaminase (e.g., ecTadA), where X indicates the presence of any amino acid other than the corresponding amino acid in the wild-type adenosine deaminase. In some embodiments, the adenosine deaminase comprises one, two, three, four, five, or six mutations selected from the group consisting of S2X, I49X, A106X, D108X, D147X, and E155X in TadA reference sequence, or a corresponding mutation or mutations in another adenosine deaminase (e.g., ecTadA), where X indicates the presence of any amino acid other than the corresponding amino acid in the wild-type adenosine deaminase. In some embodiments, the adenosine deaminase comprises one, two, three, four, or five, mutations selected from the group consisting of H8X, A106X, D108X, N127X, and K160X in TadA reference sequence, or a corresponding mutation or mutations in another adenosine deaminase (e.g., ecTadA), where X indicates the presence of any amino acid other than the corresponding amino acid in the wild-type adenosine deaminase.

[0512] In some embodiments, the adenosine deaminase comprises one, two, three, four, five, six, or seven mutations selected from the group consisting of L84F, A106V, D108N, H123Y, D147Y, E155V, and I156F in TadA reference sequence, or a corresponding mutation or mutations in another adenosine deaminase (e.g., ecTadA). In some embodiments, the adenosine deaminase comprises one, two, three, four, five, or six mutations selected from the group consisting of S2A, I49F, A106V, D108N, D147Y, and E155V in TadA reference sequence.

[0513] In some embodiments, the adenosine deaminase comprises one, two, three, four, or five, mutations selected from the group consisting of H8Y, A106T, D108N, N127S, and K160S in TadA reference sequence, or a corresponding mutation or mutations in another adenosine deaminase (e.g., ecTadA).

[0514] In some embodiments, the adenosine deaminase comprises one or more of a E25X, R26X, R107X, A142X, and/or A143X mutation in TadA reference sequence, or one or more corresponding mutations in another adenosine deaminase (e.g., ecTadA), where the presence of X indicates any amino acid other than the corresponding amino acid in the wild-type adenosine deaminase. In some embodiments, the adenosine deaminase comprises one or more of E25M, E25D, E25A, E25R, E25V, E25S, E25Y, R26G, R26N, R26Q, R26C, R26L, R26K, R107P, R107K, R107A, R107N, R107W, R107H, R107S, A142N, A142D, A142G, A143D, A143G, A143E, A143L, A143W, A143M, A143S, A143Q and/or A143R mutation in TadA reference sequence, or one or more corresponding mutations in another adenosine deaminase (e.g., ecTadA). In some embodiments, the adenosine deaminase comprises one or more of the mutations described herein corresponding to TadA reference sequence, or one or more corresponding mutations in another adenosine deaminase (e.g., ecTadA).

[0515] In some embodiments, the adenosine deaminase comprises an E25X mutation in TadA reference sequence, or a corresponding mutation in another adenosine deaminase (e.g., ecTadA), where X indicates any amino acid other than the corresponding amino acid in the wild-type adenosine deaminase. In some embodiments, the adenosine deaminase comprises an E25M, E25D, E25A, E25R, E25V, E25S, or E25Y mutation in TadA reference sequence, or a corresponding mutation in another adenosine deaminase (e.g., ecTadA).

[0516] In some embodiments, the adenosine deaminase comprises an R26X mutation in TadA reference sequence, or a corresponding mutation in another adenosine deaminase (e.g., ecTadA), where X indicates any amino acid other than the corresponding amino acid in the wild-type adenosine deaminase. In some embodiments, the adenosine deaminase comprises R26G, R26N, R26Q, R26C, R26L, or R26K mutation in TadA reference sequence, or a corresponding mutation in another adenosine deaminase (e.g., ecTadA).

[0517] In some embodiments, the adenosine deaminase comprises an R107X mutation in TadA reference sequence, or a corresponding mutation in another adenosine deaminase (e.g., ecTadA), where X indicates any amino acid other than the corresponding amino acid in the wild-type adenosine deaminase. In some embodiments, the adenosine deaminase comprises an R107P, R107K, R107A, R107N, R107W, R107H, or R107S mutation in TadA reference sequence, or a corresponding mutation in another adenosine deaminase (e.g., ecTadA).

[0518] In some embodiments, the adenosine deaminase comprises an A142X mutation in TadA reference sequence, or a corresponding mutation in another adenosine deaminase (e.g., ecTadA), where X indicates any amino acid other than the corresponding amino acid in the wild-type adenosine deaminase. In some embodiments, the adenosine deaminase comprises an A142N, A142D, A142G, mutation in TadA reference sequence, or a corresponding mutation in another adenosine deaminase (e.g., ecTadA).

[0519] In some embodiments, the adenosine deaminase comprises an A143X mutation in TadA reference sequence, or a corresponding mutation in another adenosine deaminase (e.g., ecTadA), where X indicates any amino acid other than the corresponding amino acid in the wild-type adenosine deaminase. In some embodiments, the adenosine deaminase comprises an A143D, A143G, A143E, A143L, A143W, A143M, A143S, A143Q and/or A143R mutation in TadA reference sequence, or a corresponding mutation in another adenosine deaminase (e.g., ecTadA).

[0520] In some embodiments, the adenosine deaminase comprises one or more of a H36X, N37X, P48X, I49X, R51X, M70X, N72X, D77X, E134X, S146X, Q154X, K157X, and/or K161X mutation in TadA reference sequence, or one or more corresponding mutations in another adenosine deaminase (e.g., ecTadA), where the presence of X indicates any amino acid other than the corresponding amino acid in the wild-type adenosine deaminase. In some embodiments, the adenosine deaminase comprises one or more of H36L, N37T, N37S, P48T, P48L, I49V, R51H, R51L, M70L, N72S, D77G, E134G, S146R, S146C, Q154H, K157N, and/or K161T mutation in TadA reference sequence, or one or more corresponding mutations in another adenosine deaminase (e.g., ecTadA).

[0521] In some embodiments, the adenosine deaminase comprises an H36X mutation in TadA reference sequence, or a corresponding mutation in another adenosine deaminase (e.g., ecTadA), where X indicates any amino acid other than the corresponding amino acid in the wild-type adenosine deaminase. In some embodiments, the adenosine deaminase comprises an H36L mutation in TadA reference sequence, or a corresponding mutation in another adenosine deaminase (e.g., ecTadA).

[0522] In some embodiments, the adenosine deaminase comprises an N37X mutation in TadA reference sequence, or a corresponding mutation in another adenosine deaminase (e.g., ecTadA), where X indicates any amino acid other than the corresponding amino acid in the wild-type adenosine deaminase. In some embodiments, the adenosine deaminase comprises an N37T, or N37S mutation in TadA reference sequence, or a corresponding mutation in another adenosine deaminase (e.g., ecTadA).

[0523] In some embodiments, the adenosine deaminase comprises an P48X mutation in TadA reference sequence, or a corresponding mutation in another adenosine deaminase (e.g., ecTadA), where X indicates any amino acid other than the corresponding amino acid in the wild-type adenosine deaminase. In some embodiments, the adenosine deaminase comprises an P48T, or P48L mutation in TadA reference sequence, or a corresponding mutation in another adenosine deaminase (e.g., ecTadA).

[0524] In some embodiments, the adenosine deaminase comprises an R51X mutation in TadA reference sequence, or a corresponding mutation in another adenosine deaminase, where X indicates any amino acid other than the corresponding amino acid in the wild-type adenosine deaminase. In some embodiments, the adenosine deaminase comprises an R51H, or R51L mutation in TadA reference sequence, or a corresponding mutation in another adenosine deaminase (e.g., ecTadA).

[0525] In some embodiments, the adenosine deaminase comprises an S146X mutation in TadA reference sequence, or a corresponding mutation in another adenosine deaminase (e.g., ecTadA), where X indicates any amino acid other than the corresponding amino acid in the wild-type adenosine deaminase. In some embodiments, the adenosine deaminase comprises an S146R, or S146C mutation in TadA reference sequence, or a corresponding mutation in another adenosine deaminase (e.g., ecTadA).

[0526] In some embodiments, the adenosine deaminase comprises an K157X mutation in TadA reference sequence, or a corresponding mutation in another adenosine deaminase (e.g., ecTadA), where X indicates any amino acid other than the corresponding amino acid in the wild-type adenosine deaminase. In some embodiments, the adenosine deaminase comprises a K157N mutation in TadA reference sequence, or a corresponding mutation in another adenosine deaminase (e.g., ecTadA).

[0527] In some embodiments, the adenosine deaminase comprises an P48X mutation in TadA reference sequence, or a corresponding mutation in another adenosine deaminase (e.g., ecTadA), where X indicates any amino acid other than the corresponding amino acid in the wild-type adenosine deaminase. In some embodiments, the adenosine deaminase comprises a P48S, P48T, or P48A mutation in TadA reference sequence, or a corresponding mutation in another adenosine deaminase (e.g., ecTadA).

[0528] In some embodiments, the adenosine deaminase comprises an A142X mutation in TadA reference sequence, or a corresponding mutation in another adenosine deaminase (e.g., ecTadA), where X indicates any amino acid other than the corresponding amino acid in the wild-type adenosine deaminase. In some embodiments, the adenosine deaminase comprises a A142N mutation in TadA reference sequence, or a corresponding mutation in another adenosine deaminase (e.g., ecTadA).

[0529] In some embodiments, the adenosine deaminase comprises an W23X mutation in TadA reference sequence, or a corresponding mutation in another adenosine deaminase (e.g., ecTadA), where X indicates any amino acid other than the corresponding amino acid in the wild-type adenosine deaminase. In some embodiments, the adenosine deaminase comprises a W23R, or W23L mutation in TadA reference sequence, or a corresponding mutation in another adenosine deaminase (e.g., ecTadA).

[0530] In some embodiments, the adenosine deaminase comprises an R152X mutation in TadA reference sequence, or a corresponding mutation in another adenosine deaminase (e.g., ecTadA), where X indicates any amino acid other than the corresponding amino acid in the wild-type adenosine deaminase. In some embodiments, the adenosine deaminase comprises a R152P, or R52H mutation in TadA reference sequence, or a corresponding mutation in another adenosine deaminase (e.g., ecTadA).

[0531] In one embodiment, the adenosine deaminase may comprise the mutations H36L, R51L, L84F, A106V, D108N, H123Y, S146C, D147Y, E155V, I156F, and K157N. In some embodiments, the adenosine deaminase comprises the following combination of mutations relative to TadA reference sequence, where each mutation of a combination is separated by a “_” and each combination of mutations is between parentheses:

### (A106V_D108N),

### (R107C_D108N),

### (H8Y_D108N_N127S_D147Y_Q154H),

### (H8Y_D108N_N127S_D147Y_E155V),

### (D108N_D147Y_E155V),

### (H8Y_D108N_N127S),

### (H8Y_D108N_N127S_D147Y_Q154H),

### (A106V_D108N_D147Y_E155V),

### (D108Q_D147Y_E155V),

### (D108M_D147Y_E155V),

### (D108L_D147Y_E155V),

### (D108K_D147Y_E155V),

### (D108I_D147Y_E155V),

### (D108F_D147Y_E155V),

### (A106V_D108N_D147Y),

### (A106V_D108M_D147Y_E155V),

### (E59A_A106V_D108N_D147Y_E155V),

[0532] (E59A cat dead_A106V_D108N_D147Y_E155V),

### (L84F_A106V_D108N_H123Y_D147Y_E155V_I156Y),

### (L84F_A106V_D108N_H123Y_D147Y_E155V_156F),

### (D103A_D104N),

### (G22P_D103A_D104N),

### (D103A_D104N_S138A),

### (R26G_L84F_A106V_R107H_D108N_H123Y_A142N_A143D_D147Y_E155V_I156F),

### (E25G_R26G_L84F_A106V_R107H_D108N_H123Y_A142N_A143D_D147Y_E155V_1156F),

### (E25D_R26G_L84F_A106V_R107K_D108N_H123Y_A142N_A143G_D147Y_E155V_I156F),

### (R26Q_L84F_A106V_D108N_H123Y_A142N_D147Y_E155V_I156F),

### (E25M_R26G_L84F_A106V_R107P_D108N_H123Y_A142N_A143D_D147Y_E155V_1156F),

### (R26C_L84F_A106V_R107H_D108N_H123Y_A142N_D147Y_E155V_I156F),

### (L84F_A106V_D108N_H123Y_A142N_A143L_D147Y_E155V_I156F),

### (R26G_L84F_A106V_D108N_H123Y_A142N_D147Y_E155V_I156F),

### (E25A_R26G_L84F_A106V_R107N_D108N_H123Y_A142N_A143E_D147Y_E155V_1156F),

### (R26G_L84F_A106V_R107H_D108N_H123Y_A142N_A143D_D147Y_E155V_I156F),

### (A106V_D108N_A142N_D147Y_E155V),

### (R26G_A106V_D108N_A142N_D147Y_E155V),

### (E25D_R26G_A106V_R107K_D108N_A142N_A143G_D147Y_E155V),

### (R26G_A106V_D108N_R107H_A142N_A143D_D147Y_E155V),

### (E25D_R26G_A106V_D108N_A142N_D147Y_E155V),

### (A106V_R107K_D108N_A142N_D147Y_E155V),

### (A106V_D108N_A142N_A143G_D147Y_E155V),

### (A106V_D108N_A142N_A143L_D147Y_E155V),

### (H36L_R51L_L84F_A106V_D108N_H123Y_S146C_D147Y_E155V_I156F_K157N),

### (N37T_P48T_M70L_L84F_A106V_D108N_H123Y_D147Y_I49V_E155V_I156F),

### (N37S_L84F_A106V_D108N_H123Y_D147Y_E155V_156F_K161T),

### (H36L_L84F_A106V_D108N_H123Y_D147Y_Q154H_E155V_I156F),

### (N72S_L84F_A106V_D108N_H123Y_S146R_D147Y_E155V_I156F),

### (H36L_P48L_L84F_A106V_D108N_H123Y_E134G_D147Y_E155V_I156F),

### (H36L_L84F_A106V_D108N_H123Y_D147Y_E155V_I156F_K157N),

### (H36L_L84F_A106V_D108N_H123Y_S146C_D147Y_E155V_I156F),

### (L84F_A106V_D108N_H123Y_S146R_D147Y_E155V_I156F_K161T),

### (N37S_R51H_D77G_L84F_A106V_D108N_H123Y_D147Y_E155V_I156F),

### (R51L_L84F_A106V_D108N_H123Y_D147Y_E155V_I156F_K157N),

### (D24G_Q71R_L84F_H96L_A106V_D108N_H123Y_D147Y_E155V_I156F_K160E),

### (H36L_G67V_L84F_A106V_D108N_H123Y_S146T_D147Y_E155V_I156F),

### (Q71L_L84F_A106V_D108N_H123Y_L137M_A143E_D147Y_E155V_I156F),

### (E25G_L84F_A106V_D108N_H123Y_D147Y_E155V_I156F_Q159L),

### (L84F_A91T_F104I_A106V_D108N_H123Y_D147Y_E155V_I156F),

### (N72D_L84F_A106V_D108N_H123Y_G125A_D147Y_E155V_I156F),

### (P48S_L84F_S97C_A106V_D108N_H123Y_D147Y_E155V_I156F),

### (W23G_L84F_A106V_D108N_H123Y_D147Y_E155V_I156F),

### (D24G_P48L_Q71R_L84F_A106V_D108N_H123Y_D147Y_E155V_I156F_Q159L),

### (L84F_A106V_D108N_H123Y_A142N_D147Y_E155V_I156F),

### (H36L_R51L_L84F_A106V_D108N_H123Y_A142N_S146C_D147Y_E155V_I156F_K157N), (N37S_L84F_A106V_D108N_H123Y_A142N_D147Y_E155V_I156F_K161T),

### (L84F_A106V_D108N_D147Y_E155V_I156F),

### (R51L_L84F_A106V_D108N_H123Y_S146C_D147Y_E155V_I156F_K157N_K161T),

### (L84F_A106V_D108N_H123Y_S146C_D147Y_E155V_156F_K161T),

### (L84F_A106V_D108N_H123Y_S146C_D147Y_E155V_I156F_K157N_K160E_K161T),

### (L84F_A106V_D108N_H123Y_S146C_D147Y_E155V_I156F_K157N_K160E),

### (R74Q_L84F_A106V_D108N_H123Y_D147Y_E155V_I156F),

### (R74A_L84F_A106V_D108N_H123Y_D147Y_E155V_I156F),

### (L84F_A106V_D108N_H123Y_D147Y_E155V_156F),

### (R74Q_L84F_A106V_D108N_H123Y_D147Y_E155V_I156F),

### (L84F_R98Q_A106V_D108N_H123Y_D147Y_E155V_I156F),

### (L84F_A106V_D108N_H123Y_R129Q_D147Y_E155V_I156F),

### (P48S_L84F_A106V_D108N_H123Y_A142N_D147Y_E155V_I156F),

### (P48S_A142N),

### (P48T_I49V_L84F_A106V_D108N_H123Y_A142N_D147Y_E155V_I156F_L157N),

### (P48T_I49V_A142N),

### (H36L_P48S_R51L_L84F_A106V_D108N_H123Y_S146C_D147Y_E155V_I156F_K157N),

### (H36L_P48S_R51L_L84F_A106V_D108N_H123Y_S146C_A142N_D147Y_E155V_I156F

### (H36L_P48T_I49V_R51L_L84F_A106V_D108N_H123Y_S146C_D147Y_E155V_I156F_K157N),

### (H36L_P48T_I49V_R51L_L84F_A106V_D108N_H123Y_A142N_S146C_D147Y_E155V_I156F_K157N),

### (H36L_P48A_R51L_L84F_A106V_D108N_H123Y_S146C_D147Y_E155V_I156F_K157N),

### (H36L_P48A_R51L_L84F_A106V_D108N_H123Y_A142N_S146C_D147Y_E155V_I156F_K157N),

### (H36L_P48A_R51L_L84F_A106V_D108N_H123Y_S146C_A142N_D147Y_E155V_I156F_K157N),

### (W23L_H36L_P48A_R51L_L84F_A106V_D108N_H123Y_S146C_D147Y_E155V_I156F_K157N),

### (W23R_H36L_P48A_R51L_L84F_A106V_D108N_H123Y_S146C_D147Y_E155V_I156F_K157N),

### (W23L_H36L_P48A_R51L_L84F_A106V_D108N_H123Y_S146R_D147Y_E155V_I156F_K161T),

### (H36L_P48A_R51L_L84F_A106V_D108N_H123Y_S146C_D147Y_R152H_E155V_I156F_K157N),

### (H36L_P48A_R51L_L84F_A106V_D108N_H123Y_S146C_D147Y_R152P_E155V_I156F_K157N),

### (W23L_H36L_P48A_R51L_L84F_A106V_D108N_H123Y_S146C_D147Y_R152P_E155V_I156F_K157N),

### (W23L_H36L_P48A_R51L_L84F_A106V_D108N_H123Y_A142A_S146C_D147Y_E155 V_I156F_K157N),

### (W23L_H36L_P48A_R51L_L84F_A106V_D108N_H123Y_A142A_S146C_D147Y_R152 P_E155V_I156F_K157N),

### (W23L_H36L_P48A_R51L_L84F_A106V_D108N_H123Y_S146R_D147Y_E155V_I156F_K161T),

### (W23R_H36L_P48A_R51L_L84F_A106V_D108N_H123Y_S146C_D147Y_R152P_E155V_I156F_K157N),

### (H36L_P48A_R51L_L84F_A106V_D108N_H123Y_A142N_S146C_D147Y_R152P_E155 V_I156F_K157N).

[0533] In certain embodiments, the fusion proteins provided herein comprise one or more features that improve the base editing activity of the fusion proteins. For example, any of the fusion proteins provided herein may comprise a Cas9 domain that has reduced nuclease activity. In some embodiments, any of the fusion proteins provided herein may have a Cas9 domain that does not have nuclease activity (dCas9), or a Cas9 domain that cuts one strand of a duplexed DNA molecule, referred to as a Cas9 nickase (nCas9).

[0534] In some embodiments, the adenosine deaminase is TadA*7.10. In some embodiments, TadA*7.10 comprises at least one alteration. In particular embodiments, TadA*7.10 comprises one or more of the following alterations: Y147T, Y147R, Q154S, Y123H, V82S, T166R, and Q154R. The alteration Y123H is also referred to herein as H123H (the alteration H123Y in TadA*7.10 reverted back to Y123H (wt)). In other embodiments, the TadA*7.10 comprises a combination of alterations selected from the group of: Y147T+Q154R; Y147T+Q154S; Y147R+Q154S; V82S+Q154S; V82S+Y147R; V82S+Q154R; V82S+Y123H; I76Y+V82S; V82S+Y123H+Y147T; V82S+Y123H+Y147R; V82S+Y123H+Q154R; Y147R+Q154R+Y123H; Y147R+Q154R+I76Y; Y147R+Q154R+T166R; Y123H+Y147R+Q154R+176Y; V82S+Y123H+Y147R+Q154R; and I76Y+V82S+Y123H+Y147R+Q154R. In particular embodiments, an adenosine deaminase variant comprises a deletion of the C terminus beginning at residue 149, 150, 151, 152, 153, 154, 155, 156, and 157, relative to TadA*7.10, the TadA reference sequence, or a corresponding mutation in another TadA.

[0535] In other embodiments, a base editor of the disclosure is a monomer comprising an adenosine deaminase variant (e.g., TadA*8) comprising one or more of the following alterations: Y147T, Y147R, Q154S, Y123H, V82S, T166R, and/or Q154R, relative to TadA*7.10, the TadA reference sequence, or a corresponding mutation in another TadA. In other embodiments, the adenosine deaminase variant (TadA*8) is a monomer comprising a combination of alterations selected from the group of: Y147T+Q154R; Y147T+Q154S; Y147R+Q154S; V82S+Q154S; V82S+Y147R; V82S+Q154R; V82S+Y123H; I76Y+V82S; V82S+Y123H+Y147T; V82S+Y123H+Y147R; V82S+Y123H+Q154R; Y147R+Q154R+Y123H; Y147R+Q154R+176Y; Y147R+Q154R+T166R; Y123H+Y147R+Q154R+I76Y; V82S+Y123H+Y147R+Q154R; and I76Y+V82S+Y123H+Y147R+Q154R, relative to TadA*7.10, the TadA reference sequence, or a corresponding mutation in another TadA. In other embodiments, a base editor is a heterodimer comprising a wild-type adenosine deaminase and an adenosine deaminase variant (e.g., TadA*8) comprising one or more of the following alterations Y147T, Y147R, Q154S, Y123H, V82S, T166R, and/or Q154R, relative to TadA*7.10, the TadA reference sequence, or a corresponding mutation in another TadA. In other embodiments, the base editor is a heterodimer comprising a TadA*7.10 domain and an adenosine deaminase variant domain (e.g., TadA*8) comprising a combination of alterations selected from the group of: Y147T+Q154R; Y147T+Q154S; Y147R+Q154S; V82S+Q154S; V82S+Y147R; V82S+Q154R; V82S+Y123H; I76Y+V82S; V82S+Y123H+Y147T; V82S+Y123H+Y147R; V82S+Y123H+Q154R; Y147R+Q154R+Y123H; Y147R+Q154R+I76Y; Y147R+Q154R+T166R; Y123H+Y147R+Q154R+I76Y; V82S+Y123H+Y147R+Q154R; and I76Y+V82S+Y123H+Y147R+Q154R, relative to TadA*7.10, the TadA reference sequence, or a corresponding mutation in another TadA.

[0536] In one embodiment, an adenosine deaminase is a TadA*8 that comprises or consists essentially of the following sequence or a fragment thereof having adenosine deaminase activity:

MSEVEFSHEYWMRHALTLAKRARDEREVPVGAVLVLNNRVIGEGWNRAIG
LHDPTAHAEIMALRQGGLVMQNYRLIDATLYVTFEPCVMCAGAMIHSRIG
RVVFGVRNAKTGAAGSLMDVLHYPGMNHRVEITEGILADECAALLCTFFR
MPRQVFNAQKKAQSSTD

[0537] In some embodiments, the TadA*8 is a truncated. In some embodiments, the truncated TadA*8 is missing 1, 2, 3, 4, 5, 6, 7, 8, 9, 10, 11, 12, 13, 14, 15, 6, 17, 18, 19, or 20 N-terminal amino acid residues relative to the full length TadA*8. In some embodiments, the truncated TadA*8 is missing 1, 2, 3, 4, 5, 6, 7, 8, 9, 10, 11, 12, 13, 14, 15, 6, 17, 18, 19, or 20 C-terminal amino acid residues relative to the full length TadA*8. In some embodiments the adenosine deaminase variant is a full-length TadA*8.

[0538] In some embodiments the TadA*8 is TadA*8.1, TadA*8.2, TadA*8.3, TadA*8.4, TadA*8.5, TadA*8.6, TadA*8.7, TadA*8.8, TadA*8.9, TadA*8.10, TadA*8.11, TadA*8.12, TadA*8.13, TadA*8.14, TadA*8.15, TadA*8.16, TadA*8.17, TadA*8.18, TadA*8.19, TadA*8.20, TadA*8.21, TadA*8.22, TadA*8.23, or TadA*8.24.

[0539] In one embodiment, a fusion protein of the disclosure comprises a wild-type TadA is linked to an adenosine deaminase variant described herein (e.g., TadA*8), which is linked to Cas9 nickase. In particular embodiments, the fusion proteins comprise a single TadA*8 domain (e.g., provided as a monomer). In other embodiments, the base editor comprises TadA*8 and TadA(wt), which are capable of forming heterodimers. Exemplary sequences follow:

TadA(wt) or “the TadA reference sequence”:
MSEVEFSHEYWMRHALTLAKRAWDEREVPVGAVLVHNNRVIGEGWNRPIG
RHDPTAHAEIMALRQGGLVMQNYRLIDATLYVTLEPCVMCAGAMIHSRIG
RVVFGARDAKTGAAGSLMDVLHHPGMNHRVEITEGILADECAALLSDFFR
MRRQEIKAQKKAQSSTD
TadA*7.10:
MSEVEFSHEYWMRHALTLAKRARDEREVPVGAVLVLNNRVIGEGWNRAIG
LHDPTAHAEIMALRQGGLVMQNYRLIDATLYVTFEPCVMCAGAMIHSRIG
RVVFGVRNAKTGAAGSLMDVLHYPGMNHRVEITEGILADECAALLCYFFR
MPRQVFNAQKKAQSSTD
TadA*8:
MSEVEFSHEYWMRHALTLAKRARDEREVPVGAVLVLNNRVIGEGWNRAIG
LHDPTAHAEIMALRQGGLVMQNYRLIDATLYVTFEPCVMCAGAMIHSRIG
RVVFGVRNAKTGAAGSLMDVLHYPGMNHRVEITEGILADECAALLCTFFR
MPRQVFNAQKKAQSSID.

[0540] In some embodiments, the adenosine deaminase comprises an amino acid sequence that is at least 60%, at least 65%, at least 70%, at least 75%, at least 80%, at least 85%, at least 90%, at least 95%, at least 96%, at least 97%, at least 98%, at least 99%, or at least 99.5% identical to any one of the amino acid sequences set forth in any of the adenosine deaminases provided herein. It should be appreciated that adenosine deaminases provided herein may include one or more mutations (e.g., any of the mutations provided herein). The disclosure provides any deaminase domains with a certain percent identity plus any of the mutations or combinations thereof described herein. In some embodiments, the adenosine deaminase comprises an amino acid sequence that has 1, 2, 3, 4, 5, 6, 7, 8, 9, 10, 11, 12, 13, 14, 15, 16, 17, 18, 19, 20, 21, 22, 21, 24, 25, 26, 27, 28, 29, 30, 31, 32, 33, 34, 35, 36, 37, 38, 39, 40, 41, 42, 43, 44, 45, 46, 47, 48, 49, 50, or more mutations compared to a reference sequence, or any of the adenosine deaminases provided herein. In some embodiments, the adenosine deaminase comprises an amino acid sequence that has at least 5, at least 10, at least 15, at least 20, at least 25, at least 30, at least 35, at least 40, at least 45, at least 50, at least 60, at least 70, at least 80, at least 90, at least 100, at least 110, at least 120, at least 130, at least 140, at least 150, at least 160, or at least 170 identical contiguous amino acid residues as compared to any one of the amino acid sequences known in the art or described herein.

[0541] In particular embodiments, a TadA*8 comprises one or more mutations at any of the following positions shown in bold. In other embodiments, a TadA*8 comprises one or more mutations at any of the positions shown with underlining:

| | |
|---|---|
| MSEVEFSHEY WMRHALTLAK RARDEREVPV GAVLVLNNRV IGEGWNRAIG | 50 |
| LHDPTAHAEI MALRQGGLVM QNYRLIDATL YVTFEPCVMC AGAMIHSRIG | 100 |
| RVVFGVRNAK TGAAGSLMDV LHYPGMNHRV EITEGILADE CAALLCYFFR | 150 |
| MPRQVFNAQK KAQSSTD | |

[0542] For example, the TadA*8 comprises alterations at amino acid position 82 and/or 166 (e.g., V82S, T166R) alone or in combination with any one or more of the following Y147T, Y147R, Q154S, Y123H, and/or Q154R, relative to TadA*7.10, the TadA reference sequence, or a corresponding mutation in another TadA. In particular embodiments, a combination of alterations is selected from the group of: Y147T+Q154R; Y147T+Q154S; Y147R+Q154S; V82S+Q154S; V82S+Y147R; V82S+Q154R; V82S+Y123H; I76Y+V82S; V82S+Y123H+Y147T; V82S+Y123H+Y147R; V82S+Y123H+Q154R; Y147R+Q154R+Y123H; Y147R+Q154R+176Y; Y147R+Q154R+T166R; Y123H+Y147R+Q154R+I76Y; V82S+Y123H+Y147R+Q154R; and I76Y+V82S+Y123H+Y147R+Q154R, relative to TadA*7.10, the TadA reference sequence, or a corresponding mutation in another TadA.

[0543] In some embodiments, the adenosine deaminase is TadA*8, which comprises or consists essentially of the following sequence or a fragment thereof having adenosine deaminase activity

MSEVEFSHEY WMRHALTLAK RARDEREVPV GAVLVLNNRV
IGEGWNRAIG LHDPTAHAEI MALRQGGLVM QNYRLIDATL
YVTFEPCVMC AGAMIHSRIG RVVFGVRNAK TGAAGSLMDV
LHYPGMNHRV EITEGILADE CAALLCTFFR MPRQVFNAQK
KAQSSTD

[0544] In some embodiments, the TadA*8 is truncated. In some embodiments, the truncated TadA*8 is missing 1, 2, 3, 4, 5, 6, 7, 8, 9, 10, 11, 12, 13, 14, 15, 6, 17, 18, 19, or 20 N-terminal amino acid residues relative to the full length TadA*8. In some embodiments, the truncated TadA*8 is missing 1, 2, 3, 4, 5, 6, 7, 8, 9, 10, 11, 12, 13, 14, 15, 6, 17, 18, 19, or 20 C-terminal amino acid residues relative to the full length TadA*8. In some embodiments the adenosine deaminase variant is a full-length TadA*8.

[0545] In one embodiment, a fusion protein of the disclosure comprises a wild-type TadA is linked to an adenosine deaminase variant described herein (e.g., TadA*8), which is linked to Cas9 nickase. In particular embodiments, the fusion proteins comprise a single TadA*8 domain (e.g., provided as a monomer). In other embodiments, the base editor comprises TadA*8 and TadA(wt), which are capable of forming heterodimers.

### C to T Editing

[0546] In some embodiments, a base editor disclosed herein comprises a fusion protein comprising cytidine deaminase capable of deaminating a target cytidine (C) base of a polynucleotide to produce uridine (U), which has the base pairing properties of thymine. In some embodiments, for example where the polynucleotide is double-stranded (e.g., DNA), the uridine base can then be substituted with a thymidine base (e.g., by cellular repair machinery) to give rise to a C:G to a T:A transition. In other embodiments, deamination of a C to U in a nucleic acid by a base editor cannot be accompanied by substitution of the U to a T.

[0547] The deamination of a target C in a polynucleotide to give rise to a U is a non-limiting example of a type of base editing that can be executed by a base editor described herein. In another example, a base editor comprising a cytidine deaminase domain can mediate conversion of a cytosine (C) base to a guanine (G) base. For example, a U of a polynucleotide produced by deamination of a cytidine by a cytidine deaminase domain of a base editor can be excised from the polynucleotide by a base excision repair mechanism (e.g., by a uracil DNA glycosylase (UDG) domain), producing an abasic site. The nucleobase opposite the abasic site can then be substituted (e.g., by base repair machinery) with another base, such as a C, by for example a translesion polymerase. Although it is typical for a nucleobase opposite an abasic site to be replaced with a C, other substitutions (e.g., A, G or T) can also occur.

[0548] Accordingly, in some embodiments a base editor described herein comprises a deamination domain (e.g., cytidine deaminase domain) capable of deaminating a target C to a U in a polynucleotide. Further, as described below, the base editor can comprise additional domains which facilitate conversion of the U resulting from deamination to, in some embodiments, a T or a G. For example, a base editor comprising a cytidine deaminase domain can further comprise a uracil glycosylase inhibitor (UGI) domain to mediate substitution of a U by a T, completing a C-to-T base editing event. In another example, a base editor can incorporate a translesion polymerase to improve the efficiency of C-to-G base editing, since a translesion polymerase can facilitate incorporation of a C opposite an abasic site (i.e., resulting in incorporation of a G at the abasic site, completing the C-to-G base editing event).

[0549] A base editor comprising a cytidine deaminase as a domain can deaminate a target C in any polynucleotide, including DNA, RNA and DNA-RNA hybrids. Typically, a cytidine deaminase catalyzes a C nucleobase that is positioned in the context of a single-stranded portion of a polynucleotide. In some embodiments, the entire polynucleotide comprising a target C can be single-stranded. For example, a cytidine deaminase incorporated into the base editor can deaminate a target C in a single-stranded RNA polynucleotide. In other embodiments, a base editor comprising a cytidine deaminase domain can act on a double-stranded polynucleotide, but the target C can be positioned in a portion of the polynucleotide which at the time of the deamination reaction is in a single-stranded state. For example, in embodiments where the NAGPB domain comprises a Cas9 domain, several nucleotides can be left unpaired during formation of the Cas9-gRNA-target DNA complex, resulting in formation of a Cas9 “R-loop complex”. These unpaired nucleotides can form a bubble of single-stranded DNA that can serve as a substrate for a single-strand specific nucleotide deaminase enzyme (e.g., cytidine deaminase).

[0550] In some embodiments, a cytidine deaminase of a base editor can comprise all or a portion of an apolipoprotein B mRNA editing complex (APOBEC) family deaminase. APOBEC is a family of evolutionarily conserved cytidine deaminases. Members of this family are C-to-U editing enzymes. The N-terminal domain of APOBEC like proteins is the catalytic domain, while the C-terminal domain is a pseudocatalytic domain. More specifically, the catalytic domain is a zinc dependent cytidine deaminase domain and is important for cytidine deamination. APOBEC family members include APOBEC1, APOBEC2, APOBEC3A, APOBEC3B, APOBEC3C, APOBEC3D (“APOBEC3E” now refers to this), APOBEC3F, APOBEC3G, APOBEC3H, APOBEC4, and Activation-induced (cytidine) deaminase. In some embodiments, a deaminase incorporated into a base editor comprises all or a portion of an APOBEC1 deaminase. In some embodiments, a deaminase incorporated into a base editor comprises all or a portion of APOBEC2 deaminase. In some embodiments, a deaminase incorporated into a base editor comprises all or a portion of is an APOBEC3 deaminase. In some embodiments, a deaminase incorporated into a base editor comprises all or a portion of an APOBEC3A deaminase. In some embodiments, a deaminase incorporated into a base editor comprises all or a portion of APOBEC3B deaminase. In some embodiments, a deaminase incorporated into a base editor comprises all or a portion of APOBEC3C deaminase. In some embodiments, a deaminase incorporated into a base editor comprises all or a portion of APOBEC3D deaminase. In some embodiments, a deaminase incorporated into a base editor comprises all or a portion of APOBEC3E deaminase. In some embodiments, a deaminase incorporated into a base editor comprises all or a portion of APOBEC3F deaminase. In some embodiments, a deaminase incorporated into a base editor comprises all or a portion of APOBEC3G deaminase. In some embodiments, a deaminase incorporated into a base editor comprises all or a portion of APOBEC3H deaminase. In some embodiments, a deaminase incorporated into a base editor comprises all or a portion of APOBEC4 deaminase. In some embodiments, a deaminase incorporated into a base editor comprises all or a portion of activation-induced deaminase (AID). In some embodiments a deaminase incorporated into a base editor comprises all or a portion of cytidine deaminase 1 (CDA1). It should be appreciated that a base editor can comprise a deaminase from any suitable organism (e.g., a human or a rat). In some embodiments, a deaminase domain of a base editor is from a human, chimpanzee, gorilla, monkey, cow, dog, rat, or mouse. In some embodiments, the deaminase domain of the base editor is derived from rat (e.g., rat APOBEC1). In some embodiments, the deaminase domain of the base editor is human APOBEC1. In some embodiments, the deaminase domain of the base editor is pmCDA1.

[0551] The amino acid and nucleic acid sequences of PmCDA1 are shown herein below.

>tr|A5H718|A5H718_PETMA Cytosine deaminase OS=Petromyzon marinus OX=7757 PE=2 SV=1 amino acid sequence:

MTDAEYVRIHEKLDIYTFKKQFFNNKKSVSHRCYVLFELKRRGERRACFW
GYAVNKPQSGTERGIHAEIFSIRKVEEYLRDNPGQFTINWYSSWSPCADC
AEKILEWYNQELRGNGHTLKIWACKLYYEKNARNQIGLWNLRDNGVGLNV
MVSEHYQCCRKIFIQSSHNQLNENRWLEKTLKRAEKRRSELSIMIQVKIL
HTTKSPAV

Nucleic acid sequence: >EF094822.1 Petromyzon marinus isolate PmCDA.21 cytosine deaminase mRNA, complete cds:

TGACACGACACAGCCGTGTATATGAGGAAGGGTAGCTGGATGGGGGGGGG
GGGAATACGTTCAGAGAGGACATTAGCGAGCGTCTTGTTGGTGGCCTTGA
GTCTAGACACCTGCAGACATGACCGACGCTGAGTACGTGAGAATCCATGA
GAAGTTGGACATCTACACGTTTAAGAAACAGTTTTTCAACAACAAAAAAT
CCGTGTCGCATAGATGCTACGTTCTCTTTGAATTAAAACGACGGGGTGAA
CGTAGAGCGTGTTTTTGGGGCTATGCTGTGAATAAACCACAGAGCGGGAC
AGAACGTGGAATTCACGCCGAAATCTTTAGCATTAGAAAAGTCGAAGAAT
ACCTGCGCGACAACCCCGGACAATTCACGATAAATTGGTACTCATCCTGG
AGTCCTTGTGCAGATTGCGCTGAAAAGATCTTAGAATGGTATAACCAGGA
GCTGCGGGGGAACGGCCACACTTTGAAAATCTGGGCTTGCAAACTCTATT
ACGAGAAAAATGCGAGGAATCAAATTGGGCTGTGGAACCTCAGAGATAAC
GGGGTTGGGTTGAATGTAATGGTAAGTGAACACTACCAATGTTGCAGGAA
AATATTCATCCAATCGTCGCACAATCAATTGAATGAGAATAGATGGCTTG
AGAAGACTTTGAAGCGAGCTGAAAAACGACGGAGCGAGTTGTCCATTATG
ATTCAGGTAAAAATACTCCACACCACTAAGAGTCCTGCTGTTTAAGAGGC
TATGCGGATGGTTTTC

[0552] The amino acid and nucleic acid sequences of the coding sequence (CDS) of human activation-induced cytidine deaminase (AID) are shown below.

>tr|Q6QJ80|Q6QJ80_HUMAN Activation-induced cytidine deaminase OS═Homo sapiens OX=9606 GN=AICDA PE=2 SV=1 amino acid sequence:

MDSLLMNRRKFLYQFKNVRWAKGRRETYLCYVVKRRDSATSFSLDFGYLR
NKNGCHVELLFLRYISDWDLDPGRCYRVTWFTSWSPCYDCARHVADFLRG
NPNLSLRIFTARLYFCEDRKAEPEGLRRLHRAGVQIAIMTFKAPV

[0553] The amino acid and nucleic acid sequences of the coding sequence (CDS) of human activation-induced cytidine deaminase (AID) are shown below.

>tr|Q6QJ80|Q6QJ80_HUMAN Activation-induced cytidine deaminase OS═Homo sapiens OX=9606 GN=AICDA PE=2 SV=1 amino acid sequence:

MDSLLMNRRKFLYQFKNVRWAKGRRETYLCYVVKRRDSATSFSLDFGYLR
NKNGCHVELLFLRYISDWDLDPGRCYRVTWFTSWSPCYDCARHVADFLRG
NPNLSLRIFTARLYFCEDRKAEPEGLRRLHRAGVQIAIMTFKAPV

[0554] Nucleic acid sequence: >NG_011588.1:5001-15681 Homo sapiens activation induced cytidine deaminase (AICDA), RefSeqGene (LRG_17) on chromosome 12:

AGAGAACCATCATTAATTGAAGTGAGATTTTTCTGGCCTGAGACTTGCAGGGAGGCAAGAAG
ACACTCTGGACACCACTATGGACAGGTAAAGAGGCAGTCTTCTCGTGGGTGATTGCACTGGC
CTTCCTCTCAGAGCAAATCTGAGTAATGAGACTGGTAGCTATCCCTTTCTCTCATGTAACTG
TCTGACTGATAAGATCAGCTTGATCAATATGCATATATATTTTTTGATCTGTCTCCTTTTCT
TCTATTCAGATCTTATACGCTGTCAGCCCAATTCTTTCTGTTTCAGACTTCTCTTGATTTCC
CTCTTTTTCATGTGGCAAAAGAAGTAGTGCGTACAATGTACTGATTCGTCCTGAGATTTGTA
CCATGGTTGAAACTAATTTATGGTAATAATATTAACATAGCAAATCTTTAGAGACTCAAATC
ATGAAAAGGTAATAGCAGTACTGTACTAAAAACGGTAGTGCTAATTTTCGTAATAATTTTGT
AAATATTCAACAGTAAAACAACTTGAAGACACACTTTCCTAGGGAGGCGTTACTGAAATAAT
TTAGCTATAGTAAGAAAATTTGTAATTTTAGAAATGCCAAGCATTCTAAATTAATTGCTTGA
AAGTCACTATGATTGTGTCCATTATAAGGAGACAAATTCATTCAAGCAAGTTATTTAATGTT
AAAGGCCCAATTGTTAGGCAGTTAATGGCACTTTTACTATTAACTAATCTTTCCATTTGTTC
AGACGTAGCTTAACTTACCTCTTAGGTGTGAATTTGGTTAAGGTCCTCATAATGTCTTTATG
TGCAGTTTTTGATAGGTTATTGTCATAGAACTTATTCTATTCCTACATTTATGATTACTATG
GATGTATGAGAATAACACCTAATCCTTATACTTTACCTCAATTTAACTCCTTTATAAAGAAC
TTACATTACAGAATAAAGATTTTTTAAAAATATATTTTTTTGTAGAGACAGGGTCTTAGCCC
AGCCGAGGCTGGTCTCTAAGTCCTGGCCCAAGCGATCCTCCTGCCTGGGCCTCCTAAAGTGC
TGGAATTATAGACATGAGCCATCACATCCAATATACAGAATAAAGATTTTTAATGGAGGATT
TAATGTTCTTCAGAAAATTTTCTTGAGGTCAGACAATGTCAAATGTCTCCTCAGTTTACACT
GAGATTTTGAAAACAAGTCTGAGCTATAGGTCCTTGTGAAGGGTCCATTGGAAATACTTGTT
CAAAGTAAAATGGAAAGCAAAGGTAAAATCAGCAGTTGAAATTCAGAGAAAGACAGAAAAGG
AGAAAAGATGAAATTCAACAGGACAGAAGGGAAATATATTATCATTAAGGAGGACAGTATCT
GTAGAGCTCATTAGTGATGGCAAAATGACTTGGTCAGGATTATTTTTAACCCGCTTGTTTCT
GGTTTGCACGGCTGGGGATGCAGCTAGGGTTCTGCCTCAGGGAGCACAGCTGTCCAGAGCAG
CTGTCAGCCTGCAAGCCTGAAACACTCCCTCGGTAAAGTCCTTCCTACTCAGGACAGAAATG
ACGAGAACAGGGAGCTGGAAACAGGCCCCTAACCAGAGAAGGGAAGTAATGGATCAACAAAG
TTAACTAGCAGGTCAGGATCACGCAATTCATTTCACTCTGACTGGTAACATGTGACAGAAAC
AGTGTAGGCTTATTGTATTTTCATGTAGAGTAGGACCCAAAAATCCACCCAAAGTCCTTTAT
CTATGCCACATCCTTCTTATCTATACTTCCAGGACACTTTTTCTTCCTTATGATAAGGCTCT
CTCTCTCTCCACACACACACACACACACACACACACACACACACACACACACACAAACACAC
ACCCCGCCAACCAAGGTGCATGTAAAAAGATGTAGATTCCTCTGCCTTTCTCATCTACACAG
CCCAGGAGGGTAAGTTAATATAAGAGGGATTTATTGGTAAGAGATGATGCTTAATCTGTTTA
ACACTGGGCCTCAAAGAGAGAATTTCTTTTCTTCTGTACTTATTAAGCACCTATTATGTGTT
GAGCTTATATATACAAAGGGTTATTATATGCTAATATAGTAATAGTAATGGTGGTTGGTACT
ATGGTAATTACCATAAAAATTATTATCCTTTTAAAATAAAGCTAATTATTATTGGATCTTTT
TTAGTATTCATTTTATGTTTTTTATGTTTTTGATTTTTTAAAAGACAATCTCACCCTGTTAC
CCAGGCTGGAGTGCAGTGGTGCAATCATAGCTTTCTGCAGTCTTGAACTCCTGGGCTCAAGC
AATCCTCCTGCCTTGGCCTCCCAAAGTGTTGGGATACAGTCATGAGCCACTGCATCTGGCCT
AGGATCCATTTAGATTAAAATATGCATTTTAAATTTTAAAATAATATGGCTAATTTTTACCT
TATGTAATGTGTATACTGGCAATAAATCTAGTTTGCTGCCTAAAGTTTAAAGTGCTTTCCAG
TAAGCTTCATGTACGTGAGGGGAGACATTTAAAGTGAAACAGACAGCCAGGTGTGGTGGCTC
ACGCCTGTAATCCCAGCACTCTGGGAGGCTGAGGTGGGTGGATCGCTTGAGCCCTGGAGTTC
AAGACCAGCCTGAGCAACATGGCAAAACGCTGTTTCTATAACAAAAATTAGCCGGGCATGGT
GGCATGTGCCTGTGGTCCCAGCTACTAGGGGGCTGAGGCAGGAGAATCGTTGGAGCCCAGGA
GGTCAAGGCTGCACTGAGCAGTGCTTGCGCCACTGCACTCCAGCCTGGGTGACAGGACCAGA
CCTTGCCTCAAAAAAATAAGAAGAAAAATTAAAAATAAATGGAAACAACTACAAAGAGCTGT
TGTCCTAGATGAGCTACTTAGTTAGGCTGATATTTTGGTATTTAACTTTTAAAGTCAGGGTC
TGTCACCTGCACTACATTATTAAAATATCAATTCTCAATGTATATCCACACAAAGACTGGTA
CGTGAATGTTCATAGTACCTTTATTCACAAAACCCCAAAGTAGAGACTATCCAAATATCCAT
CAACAAGTGAACAAATAAACAAAATGTGCTATATCCATGCAATGGAATACCACCCTGCAGTA
CAAAGAAGCTACTTGGGGATGAATCCCAAAGTCATGACGCTAAATGAAAGAGTCAGACATGA
AGGAGGAGATAATGTATGCCATACGAAATTCTAGAAAATGAAAGTAACTTATAGTTACAGAA
AGCAAATCAGGGCAGGCATAGAGGCTCACACCTGTAATCCCAGCACTTTGAGAGGCCACGTG
GGAAGATTGCTAGAACTCAGGAGTTCAAGACCAGCCTGGGCAACACAGTGAAACTCCATTCT
CCACAAAAATGGGAAAAAAAGAAAGCAAATCAGTGGTTGTCCTGTGGGGAGGGGAAGGACTG
CAAAGAGGGAAGAAGCTCTGGTGGGGTGAGGGTGGTGATTCAGGTTCTGTATCCTGACTGTG
GTAGCAGTTTGGGGTGTTTACATCCAAAAATATTCGTAGAATTATGCATCTTAAATGGGTGG
AGTTTACTGTATGTAAATTATACCTCAATGTAAGAAAAAATAATGTGTAAGAAAACTTTCAA
TTCTCTTGCCAGCAAACGTTATTCAAATTCCTGAGCCCTTTACTTCGCAAATTCTCTGCACT
TCTGCCCCGTACCATTAGGTGACAGCACTAGCTCCACAAATTGGATAAATGCATTTCTGGAA
AAGACTAGGGACAAAATCCAGGCATCACTTGTGCTTTCATATCAACCATGCTGTACAGCTTG
TGTTGCTGTCTGCAGCTGCAATGGGGACTCTTGATTTCTTTAAGGAAACTTGGGTTACCAGA
GTATTTCCACAAATGCTATTCAAATTAGTGCTTATGATATGCAAGACACTGTGCTAGGAGCC
AGAAAACAAAGAGGAGGAGAAATCAGTCATTATGTGGGAACAACATAGCAAGATATTTAGAT
CATTTTGACTAGTTAAAAAAGCAGCAGAGTACAAAATCACACATGCAATCAGTATAATCCAA
ATCATGTAAATATGTGCCTGTAGAAAGACTAGAGGAATAAACACAAGAATCTTAACAGTCAT
TGTCATTAGACACTAAGTCTAATTATTATTATTAGACACTATGATATTTGAGATTTAAAAAA
TCTTTAATATTTTAAAATTTAGAGCTCTTCTATTTTTCCATAGTATTCAAGTTTGACAATGA
TCAAGTATTACTCTTTCTTTTTTTTTTTTTTTTTTTTTTTTTGAGATGGAGTTTTGGTCTTG
TTGCCCATGCTGGAGTGGAATGGCATGACCATAGCTCACTGCAACCTCCACCTCCTGGGTTC
AAGCAAAGCTGTCGCCTCAGCCTCCCGGGTAGATGGGATTACAGGCGCCCACCACCACACTC
GGCTAATGTTTGTATTTTTAGTAGAGATGGGGTTTCACCATGTTGGCCAGGCTGGTCTCAAA
CTCCTGACCTCAGAGGATCCACCTGCCTCAGCCTCCCAAAGTGCTGGGATTACAGATGTAGG
CCACTGCGCCCGGCCAAGTATTGCTCTTATACATTAAAAAACAGGTGTGAGCCACTGCGCCC
AGCCAGGTATTGCTCTTATACATTAAAAAATAGGCCGGTGCAGTGGCTCACGCCTGTAATCC
CAGCACTTTGGGAAGCCAAGGCGGGCAGAACACCCGAGGTCAGGAGTCCAAGGCCAGCCTGG
CCAAGATGGTGAAACCCCGTCTCTATTAAAAATACAAACATTACCTGGGCATGATGGTGGGC
GCCTGTAATCCCAGCTACTCAGGAGGCTGAGGCAGGAGGATCCGCGGAGCCTGGCAGATCTG
CCTGAGCCTGGGAGGTTGAGGCTACAGTAAGCCAAGATCATGCCAGTATACTTCAGCCTGGG
CGACAAAGTGAGACCGTAACAAAAAAAAAAAAATTTAAAAAAAGAAATTTAGATCAAGATCC
AACTGTAAAAAGTGGCCTAAACACCACATTAAAGAGTTTGGAGTTTATTCTGCAGGCAGAAG
AGAACCATCAGGGGGTCTTCAGCATGGGAATGGCATGGTGCACCTGGTTTTTGTGAGATCAT
GGTGGTGACAGTGTGGGGAATGTTATTTTGGAGGGACTGGAGGCAGACAGACCGGTTAAAAG
GCCAGCACAACAGATAAGGAGGAAGAAGATGAGGGCTTGGACCGAAGCAGAGAAGAGCAAAC
AGGGAAGGTACAAATTCAAGAAATATTGGGGGGTTTGAATCAACACATTTAGATGATTAATT
AAATATGAGGACTGAGGAATAAGAAATGAGTCAAGGATGGTTCCAGGCTGCTAGGCTGCTTA
CCTGAGGTGGCAAAGTCGGGAGGAGTGGCAGTTTAGGACAGGGGGCAGTTGAGGAATATTGT
TTTGATCATTTTGAGTTTGAGGTACAAGTTGGACACTTAGGTAAAGACTGGAGGGGAAATCT
GAATATACAATTATGGGACTGAGGAACAAGTTTATTTTATTTTTTGTTTCGTTTTCTTGTTG
AAGAACAAATTTAATTGTAATCCCAAGTCATCAGCATCTAGAAGACAGTGGCAGGAGGTGAC
TGTCTTGTGGGTAAGGGTTTGGGGTCCTTGATGAGTATCTCTCAATTGGCCTTAAATATAAG
CAGGAAAAGGAGTTTATGATGGATTCCAGGCTCAGCAGGGCTCAGGAGGGCTCAGGCAGCCA
GCAGAGGAAGTCAGAGCATCTTCTTTGGTTTAGCCCAAGTAATGACTTCCTTAAAAAGCTGA
AGGAAAATCCAGAGTGACCAGATTATAAACTGTACTCTTGCATTTTCTCTCCCTCCTCTCAC
CCACAGCCTCTTGATGAACCGGAGGAAGTTTCTTTACCAATTCAAAAATGTCCGCTGGGCTA
AGGGTCGGCGTGAGACCTACCTGTGCTACGTAGTGAAGAGGCGTGACAGTGCTACATCCTTT
TCACTGGACTTTGGTTATCTTCGCAATAAGGTATCAATTAAAGTCGGCTTTGCAAGCAGTTT
AATGGTCAACTGTGAGTGCTTTTAGAGCCACCTGCTGATGGTATTACTTCCATCCTTTTTTG
GCATTTGTGTCTCTATCACATTCCTCAAATCCTTTTTTTTATTTCTTTTTCCATGTCCATGC
ACCCATATTAGACATGGCCCAAAATATGTGATTTAATTCCTCCCCAGTAATGCTGGGCACCC
TAATACCACTCCTTCCTTCAGTGCCAAGAACAACTGCTCCCAAACTGTTTACCAGCTTTCCT
CAGCATCTGAATTGCCTTTGAGATTAATTAAGCTAAAAGCATTTTTATATGGGAGAATATTA
TCAGCTTGTCCAAGCAAAAATTTTAAATGTGAAAAACAAATTGTGTCTTAAGCATTTTTGAA
AATTAAGGAAGAAGAATTTGGGAAAAAATTAACGGTGGCTCAATTCTGTCTTCCAAATGATT
TCTTTTCCCTCCTACTCACATGGGTCGTAGGCCAGTGAATACATTCAACATGGTGATCCCCA
GAAAACTCAGAGAAGCCTCGGCTGATGATTAATTAAATTGATCTTTCGGCTACCCGAGAGAA
TTACATTTCCAAGAGACTTCTTCACCAAAATCCAGATGGGTTTACATAAACTTCTGCCCACG
GGTATCTCCTCTCTCCTAACACGCTGTGACGTCTGGGCTTGGTGGAATCTCAGGGAAGCATC
CGTGGGGTGGAAGGTCATCGTCTGGCTCGTTGTTTGATGGTTATATTACCATGCAATTTTCT
TTGCCTACATTTGTATTGAATACATCCCAATCTCCTTCCTATTCGGTGACATGACACATTCT
ATTTCAGAAGGCTTTGATTTTATCAAGCACTTTCATTTACTTCTCATGGCAGTGCCTATTAC
TTCTCTTACAATACCCATCTGTCTGCTTTACCAAAATCTATTTCCCCTTTTCAGATCCTCCC
AAATGGTCCTCATAAACTGTCCTGCCTCCACCTAGTGGTCCAGGTATATTTCCACAATGTTA
CATCAACAGGCACTTCTAGCCATTTTCCTTCTCAAAAGGTGCAAAAAGCAACTTCATAAACA
CAAATTAAATCTTCGGTGAGGTAGTGTGATGCTGCTTCCTCCCAACTCAGCGCACTTCGTCT
TCCTCATTCCACAAAAACCCATAGCCTTCCTTCACTCTGCAGGACTAGTGCTGCCAAGGGTT
CAGCTCTACCTACTGGTGTGCTCTTTTGAGCAAGTTGCTTAGCCTCTCTGTAACACAAGGAC
AATAGCTGCAAGCATCCCCAAAGATCATTGCAGGAGACAATGACTAAGGCTACCAGAGCCGC
AATAAAAGTCAGTGAATTTTAGCGTGGTCCTCTCTGTCTCTCCAGAACGGCTGCCACGTGGA
ATTGCTCTTCCTCCGCTACATCTCGGACTGGGACCTAGACCCTGGCCGCTGCTACCGCGTCA
CCTGGTTCACCTCCTGGAGCCCCTGCTACGACTGTGCCCGACATGTGGCCGACTTTCTGCGA
GGGAACCCCAACCTCAGTCTGAGGATCTTCACCGCGCGCCTCTACTTCTGTGAGGACCGCAA
GGCTGAGCCCGAGGGGCTGCGGCGGCTGCACCGCGCCGGGGTGCAAATAGCCATCATGACCT
TCAAAGGTGCGAAAGGGCCTTCCGCGCAGGCGCAGTGCAGCAGCCCGCATTCGGGATTGCGA
TGCGGAATGAATGAGTTAGTGGGGAAGCTCGAGGGGAAGAAGTGGGCGGGGATTCTGGTTCA
CCTCTGGAGCCGAAATTAAAGATTAGAAGCAGAGAAAAGAGTGAATGGCTCAGAGACAAGGC
CCCGAGGAAATGAGAAAATGGGGCCAGGGTTGCTTCTTTCCCCTCGATTTGGAACCTGAACT
GTCTTCTACCCCCATATCCCCGCCTTTTTTTCCTTTTTTTTTTTTTGAAGATTATTTTTACT
GCTGGAATACTTTTGTAGAAAACCACGAAAGAACTTTCAAAGCCTGGGAAGGGCTGCATGAA
AATTCAGTTCGTCTCTCCAGACAGCTTCGGCGCATCCTTTTGGTAAGGGGCTTCCTCGCTTT
TTAAATTTTCTTTCTTTCTCTACAGTCTTTTTTGGAGTTTCGTATATTTCTTATATTTTCTT
ATTGTTCAATCACTCTCAGTTTTCATCTGATGAAAACTTTATTTCTCCTCCACATCAGCTTT
TTCTTCTGCTGTTTCACCATTCAGAGCCCTCTGCTAAGGTTCCTTTTCCCTCCCTTTTCTTT
CTTTTGTTGTTTCACATCTTTAAATTTCTGTCTCTCCCCAGGGTTGCGTTTCCTTCCTGGTC
AGAATTCTTTTCTCCTTTTTTTTTTTTTTTTTTTTTTTTTTTAAACAAACAAACAAAAAACC
CAAAAAAACTCTTTCCCAATTTACTTTCTTCCAACATGTTACAAAGCCATCCACTCAGTTTA
GAAGACTCTCCGGCCCCACCGACCCCCAACCTCGTTTTGAAGCCATTCACTCAATTTGCTTC
TCTCTTTCTCTACAGCCCCTGTATGAGGTTGATGACTTACGAGACGCATTTCGTACTTTGGG
ACTTTGATAGCAACTTCCAGGAATGTCACACACGATGAAATATCTCTGCTGAAGACAGTGGA
TAAAAAACAGTCCTTCAAGTCTTCTCTGTTTTTATTCTTCAACTCTCACTTTCTTAGAGTTT
ACAGAAAAAATATTTATATACGACTCTTTAAAAAGATCTATGTCTTGAAAATAGAGAAGGAA
CACAGGTCTGGCCAGGGACGTGCTGCAATTGGTGCAGTTTTGAATGCAACATTGTCCCCTAC
TGGGAATAACAGAACTGCAGGACCTGGGAGCATCCTAAAGTGTCAACGTTTTTCTATGACTT
TTAGGTAGGATGAGAGCAGAAGGTAGATCCTAAAAAGCATGGTGAGAGGATCAAATGTTTTT
ATATCAACATCCTTTATTATTTGATTCATTTGAGTTAACAGTGGTGTTAGTGATAGATTTTT
CTATTCTTTTCCCTTGACGTTTACTTTCAAGTAACACAAACTCTTCCATCAGGCCATGATCT
ATAGGACCTCCTAATGAGAGTATCTGGGTGATTGTGACCCCAAACCATCTCTCCAAAGCATT
AATATCCAATCATGCGCTGTATGTTTTAATCAGCAGAAGCATGTTTTTATGTTTGTACAAAA
GAAGATTGTTATGGGTGGGGATGGAGGTATAGACCATGCATGGTCACCTTCAAGCTACTTTA
ATAAAGGATCTTAAAATGGGCAGGAGGACTGTGAACAAGACACCCTAATAATGGGTTGATGT
CTGAAGTAGCAAATCTTCTGGAAACGCAAACTCTTTTAAGGAAGTCCCTAATTTAGAAACAC
CCACAAACTTCACATATCATAATTAGCAAACAATTGGAAGGAAGTTGCTTGAATGTTGGGGA
GAGGAAAATCTATTGGCTCTCGTGGGTCTCTTCATCTCAGAAATGCCAATCAGGTCAAGGTT
TGCTACATTTTGTATGTGTGTGATGCTTCTCCCAAAGGTATATTAACTATATAAGAGAGTTG
TGACAAAACAGAATGATAAAGCTGCGAACCGTGGCACACGCTCATAGTTCTAGCTGCTTGGG
AGGTTGAGGAGGGAGGATGGCTTGAACACAGGTGTTCAAGGCCAGCCTGGGCAACATAACAA
GATCCTGTCTCTCAAAAAAAAAAAAAAAAAAAAGAAAGAGAGAGGGCCGGGCGTGGTGGCTC
ACGCCTGTAATCCCAGCACTTTGGGAGGCCGAGCCGGGCGGATCACCTGTGGTCAGGAGTTT
GAGACCAGCCTGGCCAACATGGCAAAACCCCGTCTGTACTCAAAATGCAAAAATTAGCCAGG
CGTGGTAGCAGGCACCTGTAATCCCAGCTACTTGGGAGGCTGAGGCAGGAGAATCGCTTGAA
CCCAGGAGGTGGAGGTTGCAGTAAGCTGAGATCGTGCCGTTGCACTCCAGCCTGGGCGACAA
GAGCAAGACTCTGTCTCAGAAAAAAAAAAAAAAAAGAGAGAGAGAGAGAAAGAGAACAATAT
TTGGGAGAGAAGGATGGGGAAGCATTGCAAGGAAATTGTGCTTTATCCAACAAAATGTAAGG
AGCCAATAAGGGATCCCTATTTGTCTCTTTTGGTGTCTATTTGTCCCTAACAACTGTCTTTG
ACAGTGAGAAAAATATTCAGAATAACCATATCCCTGTGCCGTTATTACCTAGCAACCCTTGC
AATGAAGATGAGCAGATCCACAGGAAAACTTGAATGCACAACTGTCTTATTTTAATCTTATT
GTACATAAGTTTGTAAAAGAGTTAAAAATTGTTACTTCATGTATTCATTTATATTTTATATT
ATTTTGCGTCTAATGATTTTTTATTAACATGATTTCCTTTTCTGATATATTGAAATGGAGTC
TCAAAGCTTCATAAATTTATAACTTTAGAAATGATTCTAATAACAACGTATGTAATTGTAAC
ATTGCAGTAATGGTGCTACGAAGCCATTTCTCTTGATTTTTAGTAAACTTTTATGACAGCAA
ATTTGCTTCTGGCTCACTTTCAATCAGTTAAATAAATGATAAATAATTTTGGAAGCTGTGAA
GATAAAATACCAAATAAAATAATATAAAAGTGATTTATATGAAGTTAAAATAAAAAATCAGT
ATGATGGAATAAACTTG

[0555] Other exemplary deaminases that can be fused to Cas9 according to aspects of this disclosure are provided below. In embodiments, the deaminases are activation-induced deaminases (AID). It should be understood that, in some embodiments, the active domain of the respective sequence can be used, e.g., the domain without a localizing signal (nuclear localization sequence, without nuclear export signal, cytoplasmic localizing signal).

Human AID:
[sequence omitted]
(underline: nuclear localization sequence; double underline: nuclear
export signal)
Mouse AID:
MDSLLMKQKKFLYHFKNVRWAKGRHETYLCYVVKRRDSATSCSLDFGHLRNKSGCHVELLFL
RYISDWDLDPGRCYRVTWFTSWSPCYDCARHVAEFLRWNPNLSLRIFTARLYFCEDRKAEPE
GLRRLHRAGVQIGIMTFKDYFYCWNTFVENRERTFKAWEGLHENSVRLTRQLRRILLPLYEV
DDLRDAFRMLGF
(underline: nuclear localization sequence; double underline: nuclear
export signal)
Canine AID:
MDSLLMKQRKFLYHFKNVRWAKGRHETYLCYVVKRRDSATSFSLDFGHLRNKSGCHVELLFL
RYISDWDLDPGRCYRVTWFTSWSPCYDCARHVADFLRGYPNLSLRIFAARLYFCEDRKAEPE
GLRRLHRAGVQIAIMTFKDYFYCWNTFVENREKTFKAWEGLHENSVRLSRQLRRILLPLYEV
DDLRDAFRTLGL
(underline: nuclear localization sequence; double underline: nuclear
export signal)
Bovine AID:
MDSLLKKQRQFLYQFKNVRWAKGRHETYLCYVVKRRDSPTSFSLDFGHLRNKAGCHVELLFL
RYISDWDLDPGRCYRVTWFTSWSPCYDCARHVADFLRGYPNLSLRIFTARLYFCDKERKAEP
EGLRRLHRAGVQIAIMTFKDYFYCWNTFVENHERTFKAWEGLHENSVRLSRQLRRILLPLYE
VDDLRDAFRTLGL
(underline: nuclear localization sequence; double underline: nuclear
export signal)
Rat AID:
MAVGSKPKAALVGPHWERERIWCFLCSTGLGTQQTGQTSRWLRPAATQDPVSPPRSLLMKQR
KFLYHFKNVRWAKGRHETYLCYVVKRRDSATSFSLDFGYLRNKSGCHVELLFLRYISDWDLD
PGRCYRVTWFTSWSPCYDCARHVADFLRGNPNLSLRIFTARLTGWGALPAGLMSPARPSDYF
YCWNTFVENHERTFKAWEGLHENSVRLSRRLRRILLPLYEVDDLRDAFRTLGL
(underline: nuclear localization sequence; double underline:
nuclear export signal)
clAID (Canis lupus familiaris):
MDSLLMKQRKFLYHFKNVRWAKGRHETYLCYVVKRRDSATSFSLDFGHLRNKSGCHVELLFLRYISDW
DLDPGRCYRVTWFTSWSPCYDCARHVADFLRGYPNLSLRIFAARLYFCEDRKAEPEGLRRLHRAGVQI
AIMTFKDYFYCWNTFVENREKTFKAWEGLHENSVRLSRQLRRILLPLYEVDDLRDAFRTLGL
btAID (Bos Taurus):
MDSLLKKQRQFLYQFKNVRWAKGRHETYLCYVVKRRDSPTSFSLDFGHLRNKAGCHVELLFLRYISDW
DLDPGRCYRVTWFTSWSPCYDCARHVADFLRGYPNLSLRIFTARLYFCDKERKAEPEGLRRLHRAGVQ
IAIMTFKDYFYCWNTFVENHERTFKAWEGLHENSVRLSRQLRRILLPLYEVDDLRDAFRTLGL
mAID (Mus musculus):
[sequence omitted]
rAPOBEC-1 (Rattus norvegicus):
[sequence omitted]
maAPOBEC-1 (Mesocricetus auratus):
MSSETGPVVVDPTLRRRIEPHEFDAFFDQGELRKETCLLYEIRWGGRHNIWRHTGQNTSRHVEINFIE
KFTSERYFYPSTRCSIVWFLSWSPCGECSKAITEFLSGHPNVTLFIYAARLYHHTDQRNRQGLRDLIS
RGVTIRIMTEQEYCYCWRNFVNYPPSNEVYWPRYPNLWMRLYALELYCIHLGLPPCLKIKRRHQYPLT
FFRLNLQSCHYQRIPPHILWATGFI
ppAPOBEC-1 (Pongo pygmaeus):
MTSEKGPSTGDPTLRRRIESWEFDVFYDPRELRKETCLLYEIKWGMSRKIWRSSGKNTINHVEVNFIK
KFTSERRFHSSISCSITWFLSWSPCWECSQAIREFLSQHPGVTLVIYVARLFWHMDQRNRQGLRDLVN
SGVTIQIMRASEYYHCWRNFVNYPPGDEAHWPQYPPLWMMLYALELHCIILSLPPCLKISRRWQNHLA
FFRLHLQNCHYQTIPPHILLATGLIHPSVTWR
ocAPOBEC1 (Oryctolagus cuniculus):
MASEKGPSNKDYTLRRRIEPWEFEVFFDPQELRKEACLLYEIKWGASSKTWRSSGKNTINHVEVNFLE
KLTSEGRLGPSTCCSITWFLSWSPCWECSMAIREFLSQHPGVTLIIFVARLFQHMDRRNRQGLKDLVT
SGVTVRVMSVSEYCYCWENFVNYPPGKAAQWPRYPPRWMLMYALELYCIILGLPPCLKISRRHQKQLT
FFSLTPQYCHYKMIPPYILLATGLLQPSVPWR
mdAPOBEC-1 (Monodelphis domestica):
MNSKTGPSVGDATLRRRIKPWEFVAFFNPQELRKETCLLYEIKWGNQNIWRHSNQNTSQHAEINFMEK
FTAERHFNSSVRCSITWFLSWSPCWECSKAIRKFLDHYPNVTLAIFISRLYWHMDQQHRQGLKELVHS
GVTIQIMSYSEYHYCWRNFVDYPQGEEDYWPKYPYLWIMLYVLELHCIILGLPPCLKISGSHSNQLAL
FSLDLQDCHYQKIPYNVLVATGLVQPFVTWR
ppAPOBEC-2 (Pongo pygmaeus):
MAQKEEAAAATEAASQNGEDLENLDDPEKLKELIELPPFEIVTGERLPANFFKFQFRNVEYSSGRNKT
FLCYVVEAQGKGGQVQASRGYLEDEHAAAHAEEAFFNTILPAFDPALRYNVTWYVSSSPCAACADRII
KTLSKTKNLRLLILVGRLFMWEELEIQDALKKLKEAGCKLRIMKPQDFEYVWQNFVEQEEGESKAFQP
WEDIQENFLYYEEKLADILK
btAPOBEC-2 (Bos Taurus):
MAQKEEAAAAAEPASQNGEEVENLEDPEKLKELIELPPFEIVTGERLPAHYFKFQFRNVEYSSGRNKT
FLCYVVEAQSKGGQVQASRGYLEDEHATNHAEEAFFNSIMPTFDPALRYMVTWYVSSSPCAACADRIV
KTLNKTKNLRLLILVGRLFMWEEPEIQAALRKLKEAGCRLRIMKPQDFEYIWQNFVEQEEGESKAFEP
WEDIQENFLYYEEKLADILK
mAPOBEC-3-(1) (Mus musculus):
MQPQRLGPRAGMGPFCLGCSHRKCYSPIRNLISQETFKFHFKNLGYAKGRKDTFLCYEVTRKDCDSPV
SLHHGVFKNKDNIHAEICFLYWFHDKVLKVLSPREEFKITWYMSWSPCFECAEQIVRFLATHHNLSLD
IFSSRLYNVQDPETQQNLCRLVQEGAQVAAMDLYEFKKCWKKFVDNGGRRFRPWKRLLTNFRYQDSKL
QEILRPCYISVPSSSSSTLSNICLTKGLPETRFWVEGRRMDPLSEEEFYSQFYNQRVKHLCYYHRMKP
YLCYQLEQFNGQAPLKGCLLSEKGKQHAEILFLDKIRSMELSQVTITCYLTWSPCPNCAWQLAAFKRD
RPDLILHIYTSRLYFHWKRPFQKGLCSLWQSGILVDVMDLPQFTDCWTNFVNPKRPFWPWKGLEIISR
RTQRRLRRIKESWGLQDLVNDFGNLQLGPPMS
Mouse APOBEC-3-(2):
MGPFCLGCSHRKCYSPIRNLISQETFKFHFKNLGYAKGRKDTFLCYEVTRKDCDSPVSLHHGVFKNKD
NIHAEICFLYWFHDKVLKVLSPREEFKITWYMSWSPCFECAEQIVRFLATHHNLSLDIFSSRLYNVQD
PETQQNLCRLVQEGAQVAAMDLYEFKKCWKKFVDNGGRRFRPWKRLLTNFRYQDSKLQEILRPCYIPV
PSSSSSTLSNICLTKGLPETRFCVEGRRMDPLSEEEFYSQFYNQRVKHLCYYHRMKPYLCYQLEQFNG
QAPLKGCLLSEKGKQHAEILFLDKIRSMELSQVTITCYLTWSPCPNCAWQLAAFKRDRPDLILHIYTS
RLYFHWKRPFQKGLCSLWQSGILVDVMDLPQFTDCWINFVNPKRPFWPWKGLEIISRRTQRRLRRIKE
SWGLQDLVNDFGNLQLGPPMS
(italic: nucleic acid editing domain)
Rat APOBEC-3:
MGPFCLGCSHRKCYSPIRNLISQETFKFHFKNRLRYAIDRKDTFLCYEVTRKDCDSPVSLHHGVFKNK
DNIHAEICFLYWFHDKVLKVLSPREEFKITWYMSWSPCFECAEQVLRFLATHHNLSLDIFSSRLYNIR
DPENQQNLCRLVQEGAQVAAMDLYEFKKCWKKFVDNGGRRFRPWKKLLTNFRYQDSKLQEILRPCYIP
VPSSSSSTLSNICLTKGLPETRFCVERRRVHLLSEEEFYSQFYNQRVKHLCYYHGVKPYLCYQLEQFN
GQAPLKGCLLSEKGKQHAEILFLDKIRSMELSQVIITCYLTWSPCPNCAWQLAAFKRDRPDLILHIYT
SRLYFHWKRPFQKGLCSLWQSGILVDVMDLPQFTDCWTNFVNPKRPFWPWKGLEIISRRTQRRLHRIK
ESWGLQDLVNDFGNLQLGPPMS
(italic: nucleic acid editing domain)
hAPOBEC-3A (Homo sapiens):
MEASPASGPRHLMDPHIFTSNFNNGIGRHKTYLCYEVERLDNGTSVKMDQHRGFLHNQAKNLLCGFYG
RHAELRFLDLVPSLQLDPAQIYRVTWFISWSPCFSWGCAGEVRAFLQENTHVRLRIFAARIYDYDPLY
KEALQMLRDAGAQVSIMTYDEFKHCWDTFVDHQGCPFQPWDGLDEHSQALSGRLRAILQNQGN
hAPOBEC-3F (Homo sapiens):
MKPHFRNTVERMYRDTFSYNFYNRPILSRRNTVWLCYEVKTKGPSRPRLDAKIFRGQVYSQPEHHAEM
CFLSWFCGNQLPAYKCFQITWFVSWTPCPDCVAKLAEFLAEHPNVTLTISAARLYYYWERDYRRALCR
LSQAGARVKIMDDEEFAYCWENFVYSEGQPFMPWYKFDDNYAFLHRTLKEILRNPMEAMYPHIFYFHF
KNLRKAYGRNESWLCFTMEVVKHHSPVSWKRGVFRNQVDPETHCHAERCFLSWFCDDILSPNTNYEVT
WYTSWSPCPECAGEVAEFLARHSNVNLTIFTARLYYFWDTDYQEGLRSLSQEGASVEIMGYKDFKYCW
ENFVYNDDEPFKPWKGLKYNFLFLDSKLQEILE
Rhesus macaque APOBEC-3G:
MVEPMDPRTFVSNFNNRPILSGLNTVWLCCEVKTKDPSGPPLDAKIFQGKVYSKAKYHPEMRFLRWFH
KWRQLHHDQEYKVTWYVSWSPCTRCANSVATFLAKDPKVTLTIFVARLYYFWKPDYQQALRILCQKRG
GPHATMKIMNYNEFQDCWNKFVDGRGKPFKPRNNLPKHYTLLQATLGELLRHLMDPGTFTSNFNNKPW
VSGQHETYLCYKVERLHNDTWVPLNQHRGFLRNQAPNIHGFPKGRHAELCFLDLIPFWKLDGQQYRVT
CFTSWSPCFSCAQEMAKFISNNEHVSLCIFAARIYDDQGRYQEGLRALHRDGAKIAMMNYSEFEYCWD
TFVDRQGRPFQPWDGLDEHSQALSGRLRAI
(italic: nucleic acid editing domain; underline: cytoplasmic
localization signal)
Chimpanzee APOBEC-3G:
MKPHFRNPVERMYQDTFSDNFYNRPILSHRNTVWLCYEVKTKGPSRPPLDAKIFRGQVYSKLKYHPEM
RFFHWFSKWRKLHRDQEYEVTWYISWSPCTKCTRDVATFLAEDPKVTLTIFVARLYYFWDPDYQEALR
SLCQKRDGPRATMKIMNYDEFQHCWSKFVYSQRELFEPWNNLPKYYILLHIMLGEILRHSMDPPTFTS
NFNNELWVRGRHETYLCYEVERLHNDTWVLLNQRRGFLCNQAPHKHGFLEGRHAELCFLDVIPFWKLD
LHQDYRVTCFTSWSPCFSCAQEMAKFISNNKHVSLCIFAARIYDDQGRCQEGLRTLAKAGAKISIMTY
SEFKHCWDTFVDHQGCPFQPWDGLEEHSQALSGRLRAILQNQGN
(italic: nucleic acid editing domain; underline: cytoplasmic
localization signal)
Green monkey APOBEC-3G:
MNPQIRNMVEQMEPDIFVYYFNNRPILSGRNTVWLCYEVKTKDPSGPPLDANIFQGKLYPEAKDHPEM
KFLHWFRKWRQLHRDQEYEVTWYVSWSPCTRCANSVATFLAEDPKVTLTIFVARLYYFWKPDYQQALR
ILCQERGGPHATMKIMNYNEFQHCWNEFVDGQGKPFKPRKNLPKHYTLLHATLGELLRHVMDPGTFTS
NFNNKPWVSGQRETYLCYKVERSHNDTWVLLNQHRGFLRNQAPDRHGFPKGRHAELCFLDLIPFWKLD
DQQYRVTCFTSWSPCFSCAQKMAKFISNNKHVSLCIFAARIYDDQGRCQEGLRTLHRDGAKIAVMNYS
EFEYCWDTFVDRQGRPFQPWDGLDEHSQALSGRLRAI
(italic: nucleic acid editing domain; underline: cytoplasmic
localization signal)
Human APOBEC-3G:
MKPHFRNTVERMYRDTFSYNFYNRPILSRRNTVWLCYEVKTKGPSRPPLDAKIFRGQVYSELKYHPEM
RFFHWFSKWRKLHRDQEYEVTWYISWSPCTKCTRDMATFLAEDPKVTLTIFVARLYYFWDPDYQEALR
SLCQKRDGPRATMKIMNYDEFQHCWSKFVYSQRELFEPWNNLPKYYILLHIMLGEILRHSMDPPTFTF
NFNNEPWVRGRHETYLCYEVERMHNDTWVLLNQRRGFLCNQAPHKHGFLEGRHAELCFLDVIPFWKLD
LDQDYRVTCFTSWSPCFSCAQEMAKFISKNKHVSLCIFTARIYDDQGRCQEGLRTLAEAGAKISIMTY
SEFKHCWDTFVDHQGCPFQPWDGLDEHSQDLSGRLRAILQNQEN
(italic: nucleic acid editing domain; underline: cytoplasmic
localization signal)
Human APOBEC-3F:
MKPHFRNTVERMYRDTFSYNFYNRPILSRRNTVWLCYEVKTKGPSRPRLDAKIFRGQVYSQPEHHAEM
CFLSWFCGNQLPAYKCFQITWFVSWTPCPDCVAKLAEFLAEHPNVTLTISAARLYYYWERDYRRALCR
LSQAGARVKIMDDEEFAYCWENFVYSEGQPFMPWYKFDDNYAFLHRTLKEILRNPMEAMYPHIFYFHF
KNLRKAYGRNESWLCFTMEVVKHHSPVSWKRGVFRNQVDPETHCHAERCFLSWFCDDILSPNTNYEVT
WYTSWSPCPECAGEVAEFLARHSNVNLTIFTARLYYFWDTDYQEGLRSLSQEGASVEIMGYKDFKYCW
ENFVYNDDEPFKPWKGLKYNFLFLDSKLQEILE
(italic: nucleic acid editing domain)
Human APOBEC-3B:
MNPQIRNPMERMYRDTFYDNFENEPILYGRSYTWLCYEVKIKRGRSNLLWDTGVFRGQVYFKPQYHAE
MCFLSWFCGNQLPAYKCFQITWFVSWTPCPDCVAKLAEFLSEHPNVTLTISAARLYYYWERDYRRALC
RLSQAGARVTIMDYEEFAYCWENFVYNEGQQFMPWYKFDENYAFLHRTLKEILRYLMDPDTFTFNFNN
DPLVLRRRQTYLCYEVERLDNGTWVLMDQHMGFLCNEAKNLLCGFYGRHAELRFLDLVPSLQLDPAQI
YRVTWFISWSPCFSWGCAGEVRAFLQENTHVRLRIFAARIYDYDPLYKEALQMLRDAGAQVSIMTYDE
FEYCWDTFVYRQGCPFQPWDGLEEHSQALSGRLRAILQNQGN
(italic: nucleic acid editing domain)
Rat APOBEC-3B:
MQPQGLGPNAGMGPVCLGCSHRRPYSPIRNPLKKLYQQTFYFHFKNVRYAWGRKNNFLCYEVNGMDCA
LPVPLRQGVFRKQGHIHAELCFIYWFHDKVLRVLSPMEEFKVTWYMSWSPCSKCAEQVARFLAAHRNL
SLAIFSSRLYYYLRNPNYQQKLCRLIQEGVHVAAMDLPEFKKCWNKFVDNDGQPFRPWMRLRINFSFY
DCKLQEIFSRMNLLREDVFYLQFNNSHRVKPVQNRYYRRKSYLCYQLERANGQEPLKGYLLYKKGEQH
VEILFLEKMRSMELSQVRITCYLTWSPCPNCARQLAAFKKDHPDLILRIYTSRLYFWRKKFQKGLCTL
WRSGIHVDVMDLPQFADCWTNFVNPQRPFRPWNELEKNSWRIQRRLRRIKESWGL
Bovine APOBEC-3B:
DGWEVAFRSGTVLKAGVLGVSMTEGWAGSGHPGQGACVWTPGTRNTMNLLREVLFKQQFGNQPRVPAP
YYRRKTYLCYQLKQRNDLTLDRGCFRNKKQRHAERFIDKINSLDLNPSQSYKIICYITWSPCPNCANE
LVNFITRNNHLKLEIFASRLYFHWIKSFKMGLQDLQNAGISVAVMTHTEFEDCWEQFVDNQSRPFQPW
DKLEQYSASIRRRLQRILTAPI
Chimpanzee APOBEC-3B:
MNPQIRNPMEWMYQRTFYYNFENEPILYGRSYTWLCYEVKIRRGHSNLLWDTGVFRGQMYSQPEHHAE
MCFLSWFCGNQLSAYKCFQITWFVSWTPCPDCVAKLAKFLAEHPNVTLTISAARLYYYWERDYRRALC
RLSQAGARVKIMDDEEFAYCWENFVYNEGQPFMPWYKFDDNYAFLHRTLKEIIRHLMDPDTFTFNFNN
DPLVLRRHQTYLCYEVERLDNGTWVLMDQHMGFLCNEAKNLLCGFYGRHAELRFLDLVPSLQLDPAQI
YRVTWFISWSPCFSWGCAGQVRAFLQENTHVRLRIFAARIYDYDPLYKEALQMLRDAGAQVSIMTYDE
FEYCWDTFVYRQGCPFQPWDGLEEHSQALSGRLRAILQVRASSLCMVPHRPPPPPQSPGPCLPLCSEP
PLGSLLPTGRPAPSLPFLLTASFSFPPPASLPPLPSLSLSPGHLPVPSFHSLTSCSIQPPCSSRIRET
EGWASVSKEGRDLG
Human APOBEC-3C:
MNPQIRNPMKAMYPGTFYFQFKNLWEANDRNETWLCFTVEGIKRRSVVSWKTGVFRNQVDSETHCHAE
RCFLSWFCDDILSPNTKYQVTWYTSWSPCPDCAGEVAEFLARHSNVNLTIFTARLYYFQYPCYQEGLR
SLSQEGVAVEIMDYEDFKYCWENFVYNDNEPFKPWKGLKTNFRLLKRRLRESLQ
(italic: nucleic acid editing domain)
Gorilla APOBEC-3C
MNPQIRNPMKAMYPGTFYFQFKNLWEANDRNETWLCFTVEGIKRRSVVSWKTGVFRNQVDSETHCHAE
RCFLSWECDDILSPNTNYQVTWYTSWSPCPECAGEVAEFLARHSNVNLTIFTARLYYFQDTDYQEGLR
SLSQEGVAVKIMDYKDFKYCWENFVYNDDEPFKPWKGLKYNFRFLKRRLQEILE
(italic: nucleic acid editing domain)
Human APOBEC-3A:
MEASPASGPRHLMDPHIFTSNFNNGIGRHKTYLCYEVERLDNGTSVKMDQHRGFLHNQAKNLLCGFYG
RHAELRFLDLVPSLQLDPAQIYRVTWFISWSPCFSWGCAGEVRAFLQENTHVRLRIFAARIYDYDPLY
KEALQMLRDAGAQVSIMTYDEFKHCWDTFVDHQGCPFQPWDGLDEHSQALSGRLRAILQNQGN
(italic: nucleic acid editing domain)
Rhesus macaque APOBEC-3A:
MDGSPASRPRHLMDPNTFTFNFNNDLSVRGRHQTYLCYEVERLDNGTWVPMDERRGFLCNKAKNVPCG
DYGCHVELRFLCEVPSWQLDPAQTYRVTWFISWSPCFRRGCAGQVRVFLQENKHVRLRIFAARIYDYD
PLYQEALRTLRDAGAQVSIMTYEEFKHCWDTFVDRQGRPFQPWDGLDEHSQALSGRLRAILQNQGN
(italic: nucleic acid editing domain)
Bovine APOBEC-3A:
MDEYTFTENFNNQGWPSKTYLCYEMERLDGDATIPLDEYKGFVRNKGLDQPEKPCHAELYFLGKIHSW
NLDRNQHYRLTCFISWSPCYDCAQKLITFLKENHHISLHILASRIYTHNRFGCHQSGLCELQAAGARI
TIMTFEDFKHCWETFVDHKGKPFQPWEGLNVKSQALCTELQAILKTQQN
(italic: nucleic acid editing domain)
Human APOBEC-3H:
MALLTAETFRLQFNNKRRLRRPYYPRKALLCYQLTPQNGSTPTRGYFENKKKCHAEICFINEIKSMGL
DETQCYQVTCYLTWSPCSSCAWELVDFIKAHDHLNLGIFASRLYYHWCKPQQKGLRLLCGSQVPVEVM
GFPKFADCWENFVDHEKPLSFNPYKMLEELDKNSRAIKRRLERIKIPGVRAQGRYMDILCDAEV
(italic: nucleic acid editing domain)
Rhesus macaque APOBEC-3H:
MALLTAKTFSLQFNNKRRVNKPYYPRKALLCYQLTPQNGSTPTRGHLKNKKKDHAEIRFINKIKSMGL
DETQCYQVTCYLTWSPCPSCAGELVDFIKAHRHLNLRIFASRLYYHWRPNYQEGLLLLCGSQVPVEVM
GLPEFTDCWENFVDHKEPPSFNPSEKLEELDKNSQAIKRRLERIKSRSVDVLENGLRSLQLGPVTPSS
SIRNSR
Human APOBEC-3D:
MNPQIRNPMERMYRDTFYDNFENEPILYGRSYTWLCYEVKIKRGRSNLLWDTGVFRGPVLPKRQSNHR
QEVYFRFENHAEMCFLSWFCGNRLPANRRFQITWFVSWNPCLPCVVKVTKFLAEHPNVTLTISAARLY
YYRDRDWRWVLLRLHKAGARVKIMDYEDFAYCWENFVCNEGQPFMPWYKFDDNYASLHRTLKEILRNP
MEAMYPHIFYFHFKNLLKACGRNESWLCFTMEVTKHHSAVFRKRGVFRNQVDPETHCHAERCFLSWFC
DDILSPNTNYEVTWYTSWSPCPECAGEVAEFLARHSNVNLTIFTARLCYFWDTDYQEGLCSLSQEGAS
VKIMGYKDFVSCWKNFVYSDDEPFKPWKGLQINFRLLKRRLREILQ
(italic: nucleic acid editing domain)
Human APOBEC-1:
MTSEKGPSTGDPTLRRRIEPWEFDVFYDPRELRKEACLLYEIKWGMSRKIWRSSGKNTINHVEVNFIK
KFTSERDFHPSMSCSITWFLSWSPCWECSQAIREFLSRHPGVTLVIYVARLFWHMDQQNRQGLRDLVN
SGVTIQIMRASEYYHCWRNFVNYPPGDEAHWPQYPPLWMMLYALELHCIILSLPPCLKISRRWQNHLT
FFRLHLQNCHYQTIPPHILLATGLIHPSVAWR
Mouse APOBEC-1:
MSSETGPVAVDPTLRRRIEPHEFEVFFDPRELRKETCLLYEINWGGRHSVWRHTSQNTSNHVEVNFLE
KFTTERYFRPNTRCSITWFLSWSPCGECSRAITEFLSRHPYVTLFIYIARLYHHTDQRNRQGLRDLIS
SGVTIQIMTEQEYCYCWRNFVNYPPSNEAYWPRYPHLWVKLYVLELYCIILGLPPCLKILRRKQPQLT
FFTITLQTCHYQRIPPHLLWATGLK
Rat APOBEC-1:
[sequence omitted]
Human APOBEC-2:
MAQKEEAAVATEAASQNGEDLENLDDPEKLKELIELPPFEIVTGERLPANFFKFQFRNVEYSSGRNKT
FLCYVVEAQGKGGQVQASRGYLEDEHAAAHAEEAFFNTILPAFDPALRYNVTWYVSSSPCAACADRII
KTLSKTKNLRLLILVGRLFMWEEPEIQAALKKLKEAGCKLRIMKPQDFEYVWQNFVEQEEGESKAFQP
WEDIQENFLYYEEKLADILK
Mouse APOBEC-2:
MAQKEEAAEAAAPASQNGDDLENLEDPEKLKELIDLPPFEIVTGVRLPVNFFKFQFRNVEYSSGRNKT
FLCYVVEVQSKGGQAQATQGYLEDEHAGAHAEEAFFNTILPAFDPALKYNVTWYVSSSPCAACADRIL
KTLSKTKNLRLLILVSRLFMWEEPEVQAALKKLKEAGCKLRIMKPQDFEYIWQNFVEQEEGESKAFEP
WEDIQENFLYYEEKLADILK
Rat APOBEC-2:
MAQKEEAAEAAAPASQNGDDLENLEDPEKLKELIDLPPFEIVTGVRLPVNFFKFQFRNVEYSSGRNKT
FLCYVVEAQSKGGQVQATQGYLEDEHAGAHAEEAFFNTILPAFDPALKYNVTWYVSSSPCAACADRIL
KTLSKTKNLRLLILVSRLFMWEEPEVQAALKKLKEAGCKLRIMKPQDFEYLWQNFVEQEEGESKAFEP
WEDIQENFLYYEEKLADILK
Bovine APOBEC-2:
MAQKEEAAAAAEPASQNGEEVENLEDPEKLKELIELPPFEIVTGERLPAHYFKFQFRNVEYSSGRNKT
FLCYVVEAQSKGGQVQASRGYLEDEHATNHAEEAFFNSIMPTFDPALRYMVTWYVSSSPCAACADRIV
KTLNKTKNLRLLILVGRLFMWEEPEIQAALRKLKEAGCRLRIMKPQDFEYIWQNFVEQEEGESKAFEP
WEDIQENFLYYEEKLADILK
Petromyzon marinus CDA1 (pmCDA1):
MTDAEYVRIHEKLDIYTFKKQFFNNKKSVSHRCYVLFELKRRGERRACFWGYAVNKPQSGTERGIHAE
IFSIRKVEEYLRDNPGQFTINWYSSWSPCADCAEKILEWYNQELRGNGHTLKIWACKLYYEKNARNQI
GLWNLRDNGVGLNVMVSEHYQCCRKIFIQSSHNQ
LNENRWLEKTLKRAEKRRSELSFMIQVKILHTTKSPAV
Human APOBEC3G D316R D317R:
MKPHFRNTVERMYRDTFSYNFYNRPILSRRNTVWLCYEVKTKGPSRPPLDAKIFRGQVYSELKYHPEM
RFFHWFSKWRKLHRDQEYEVTWYISWSPCTKCTRDMATFLAEDPKVTLTIFVARLYYFWDPDYQEALR
SLCQKRDGPRATMKFNYDEFQHCWSKFVYSQRELFEPWNNLPKYYILLHFMLGEILRHSMDPPTFTFN
FNNEPWVRGRHETYLCYEVERMHNDTWVLLNQRRGFLCNQAPHKHGFLEGRHAELCFLDVIPFWKLDL
DQDYRVTCFTSWSPCFSCAQEMAKFISKKHVSLCIFTARIYRRQGRCQEGLRTLAEAGAKISFTYSEF
KHCWDTFVDHQGCPFQPWDGLDEHSQDLSGRLRAILQNQEN
Human APOBEC3G chain A:
MDPPTFTFNFNNEPWWGRHETYLCYEVERMHNDTWVLLNQRRGFLCNQAPHKHGFLEGRHAELCFLDV
IPFWKLDLDQDYRVTCFTSWSPCFSCAQEMAKFISKNKHVSLCIFTARIYDDQGRCQEGLRTLAEAGA
KISFTYSEFKHCWDTFVDHQGCPFQPWDGLDEHSQDLSGRLRAILQ
Human APOBEC3G chain A D120R D121R:
MDPPTFTFNFNNEPWVRGRHETYLCYEVERMHNDTWVLLNQRRGFLCNQAPHKHGFLEGRHAELCFLD
VIPFWKLDLDQDYRVTCFTSWSPCFSCAQEMAKFISKNKHVSLCIFTARIYRRQGRCQEGLRTLAEAG
AKISFMTYSEFKHCWDTFVDHQGCPFQPWDGLDEHSQDLSGRLRAILQ
hAPOBEC-4 (Homo sapiens):
MEPIYEEYLANHGTIVKPYYWLSFSLDCSNCPYHIRTGEEARVSLTEFCQIFGFPYGTTFPQTKHLTF
YELKTSSGSLVQKGHASSCTGNYIHPESMLFEMNGYLDSAIYNNDSIRHIILYSNNSPCNEANHCCIS
KMYNFLITYPGITLSIYFSQLYHTEMDFPASAWNREALRSLASLWPRVVLSPISGGIWHSVLHSFISG
VSGSHVFQPILTGRALADRHNAYEINAITGVKPYFTDVLLQTKRNPNTKAQEALESYPLNNAFPGQFF
QMPSGQLQPNLPPDLRAPVVFVLVPLRDLPPMHMGQNPNKPRNIVRHLNMPQMSFQETKDLGRLPTGR
SVEIVEITEQFASSKEADEKKKKKGKK
mAPOBEC-4 (Mus musculus):
MDSLLMKQKKFLYHFKNVRWAKGRHETYLCYVVKRRDSATSCSLDFGHLRNKSGCHVELLFLRYISDW
DLDPGRCYRVTWFTSWSPCYDCARHVAEFLRWNPNLSLRIFTARLYFCEDRKAEPEGLRRLHRAGVQI
GIMTFKDYFYCWNTFVENRERTFKAWEGLHENSVRLTRQLRRILLPLYEVDDLRDAFRMLGF
rAPOBEC-4 (Rattus norvegicus):
MEPLYEEYLTHSGTIVKPYYWLSVSLNCTNCPYHIRTGEEARVPYTEFHQTFGFPWSTYPQTKHLTFY
ELRSSSGNLIQKGLASNCTGSHTHPESMLFERDGYLDSLIFHDSNIRHIILYSNNSPCDEANHCCISK
MYNFLMNYPEVILSVFFSQLYHTENQFPTSAWNREALRGLASLWPQVILSAISGGIWQSILETFVSGI
SEGLTAVRPFTAGRTLTDRYNAYEINCITEVKPYFTDALHSWQKENQDQKVWAASENQPLHNTTPAQW
QPDMSQDCRTPAVFMLVPYRDLPPIHVNPSPQKPRTVVRHLNTLQLSASKVKALRKSPSGRPVKKEEA
RKGSTRSQEANETNKSKWKKQTLFIKSNICHLLEREQKKIGILSSWSV
mfAPOBEC-4 (Macaca fascicularis):
MEPTYEEYLANHGTIVKPYYWLSFSLDCSNCPYHIRTGEEARVSLTEFCQIFGFPYGTTYPQTKHLTF
YELKTSSGSLVQKGHASSCTGNYIHPESMLFEMNGYLDSAIYNNDSIRHIILYCNNSPCNEANHCCIS
KVYNFLITYPGITLSIYFSQLYHTEMDFPASAWNREALRSLASLWPRVVLSPISGGIWHSVLHSFVSG
VSGSHVFQPILTGRALTDRYNAYEINAITGVKPFFTDVLLHTKRNPNTKAQMALESYPLNNAFPGQSF
QMTSGIPPDLRAPVVFVLLPLRDLPPMHMGQDPNKPRNIIRHLNMPQMSFQETKDLERLPTRRSVETV
EITERFASSKQAEEKTKKKKGKK
pmCDA-1 (Petromyzon marinus):
MAGYECVRVSEKLDFDTFEFQFENLHYATERHRTYVIFDVKPQSAGGRSRRLWGYIINNPNVCHAELI
LMSMIDRHLESNPGVYAMTWYMSWSPCANCSSKLNPWLKNLLEEQGHTLTMHFSRIYDRDREGDHRGL
RGLKHVSNSFRMGVVGRAEVKECLAEYVEASRRTLTWLDTTESMAAKMRRKLFCILVRCAGMRESGIP
LHLFTLQTPLLSGRVVWWRV
pmCDA-2 (Petromyzon marinus):
MELREVVDCALASCVRHEPLSRVAFLRCFAAPSQKPRGTVILFYVEGAGRGVTGGHAVNYNKQGTSIH
AEVLLLSAVRAALLRRRRCEDGEEATRGCTLHCYSTYSPCRDCVEYIQEFGASTGVRVVIHCCRLYEL
DVNRRRSEAEGVLRSLSRLGRDFRLMGPRDAIALLLGGRLANTADGESGASGNAWVTETNVVEPLVDM
TGFGDEDLHAQVQRNKQIREAYANYASAVSLMLGELHVDPDKFPFLAEFLAQTSVEPSGTPRETRGRP
RGASSRGPEIGRQRPADFERALGAYGLFLHPRIVSREADREEIKRDLIVVMRKHNYQGP
pmCDA-5 (Petromyzon marinus):
MAGDENVRVSEKLDFDTFEFQFENLHYATERHRTYVIFDVKPQSAGGRSRRLWGYIINNPNVCHAELI
LMSMIDRHLESNPGVYAMTWYMSWSPCANCSSKLNPWLKNLLEEQGHTLMMHFSRIYDRDREGDHRGL
RGLKHVSNSFRMGVVGRAEVKECLAEYVEASRRILTWLDTTESMAAKMRRKLFCILVRCAGMRESGMP
LHLFT
yCD (Saccharomyces cerevisiae):
MVTGGMASKWDQKGMDIAYEEAALGYKEGGVPIGGCLINNKDGSVLGRGHNMRFQKGSATLHGEISTL
ENCGRLEGKVYKDTTLYTTLSPCDMCTGAIIMYGIPRCVVGENVNFKSKGEKYLQTRGHEVVVVDDER
CKKIMKQFIDERPQDWFEDIGE
rAPOBEC-1 (delta 177-186):
MSSETGPVAVDPTLRRRIEPHEFEVFFDPRELRKETCLLYEINWGGRHSIWRHTSQNTNKHVEVNFIE
KFTTERYFCPNTRCSITWFLSWSPCGECSRAITEFLSRYPHVTLFIYIARLYHHADPRNRQGLRDLIS
SGVTIQIMTEQESGYMWRNFVNYSPSNEAHWPRYPHLWVRGLPPCLNILRRKQPQLITFTIALQSCHY
QRLPPHILTNATGLK
rAPOBEC-1 (delta 202-213):
MSSETGPVAVDPILRRRIEPHEFEVFFDPRELRKETCLLYEINWGGRHSIWRHTSQNTNKHVEVNFIE
KFTTERYFCPNTRCSITWFLSWSPCGECSRAITEFLSRYPHVTLFIYIARLYHHADPRNRQGLRDLIS
SGVTIQIMTEQESGYCWRNFVNYSPSNEAHWPRYPHLWVRLYVLELYCIILGLPPCLNILRRKQPQHY
QRLPPHILTNATGLK
Mouse APOBEC-3:
MGPFCLGCSHRKCYSPIRNLISQETFKFHFKNLGYAKGRKDTFLCYEVTRKDCDSPVSLHHG
VFKNKDNIHAEICFLYWFHDKVLKVLSPREEFKITWYMSWSPCFECAEQIVRFLATHHNLSL
DIFSSRLYNVQDPETQQNLCRLVQEGAQVAAMDLYEFKKCWKKFVDNGGRRFRPWKRLLTNF
RYQDSKLQEILRPCYIPVPSSSSSTLSNICLTKGLPETRFCVEGRRMDPLSEEEFYSQFYNQ
RVKHLCYYHRMKPYLCYQLEQFNGQAPLKGCLLSEKGKQHAEILFLDKIRSMELSQVTITCY
LTWSPCPNCAWQLAAFKRDRPDLILHIYTSRLYFHWKRPFQKGLCSLWQSGILVDVMDLPQF
TDCWTNFVNPKRPFWPWKGLEIISRRTQRRLRRIKESWGLQDLVNDFGNLQLGPPMS
(italic: nucleic acid editing domain)

[0556] Some aspects of the present disclosure are based on the recognition that modulating the deaminase domain catalytic activity of any of the fusion proteins described herein, for example by making point mutations in the deaminase domain, affect the processivity of the fusion proteins (e.g., base editors). For example, mutations that reduce, but do not eliminate, the catalytic activity of a deaminase domain within a base editing fusion protein can make it less likely that the deaminase domain will catalyze the deamination of a residue adjacent to a target residue, thereby narrowing the deamination window. The ability to narrow the deamination window can prevent unwanted deamination of residues adjacent to specific target residues, which can decrease or prevent off-target effects.

[0557] For example, in some embodiments, an APOBEC deaminase incorporated into a base editor can comprise one or more mutations selected from the group consisting of H121X, H122X, R126X, R126X, R118X, W90X, W90X, and R132X of rAPOBEC1, or one or more corresponding mutations in another APOBEC deaminase, wherein X is any amino acid. In some embodiments, an APOBEC deaminase incorporated into a base editor can comprise one or more mutations selected from the group consisting of H121R, H122R, R126A, R126E, R118A, W90A, W90Y, and R132E of rAPOBEC1, or one or more corresponding mutations in another APOBEC deaminase.

[0558] In some embodiments, an APOBEC deaminase incorporated into a base editor can comprise one or more mutations selected from the group consisting of D316X, D317X, R320X, R320X, R313X, W285X, W285X, R326X of hAPOBEC3G, or one or more corresponding mutations in another APOBEC deaminase, wherein X is any amino acid. In some embodiments, any of the fusion proteins provided herein comprise an APOBEC deaminase comprising one or more mutations selected from the group consisting of D316R, D317R, R320A, R320E, R313A, W285A, W285Y, R326E of hAPOBEC3G, or one or more corresponding mutations in another APOBEC deaminase.

[0559] In some embodiments, an APOBEC deaminase incorporated into a base editor can comprise a H121R and a H122R mutation of rAPOBEC1, or one or more corresponding mutations in another APOBEC deaminase. In some embodiments an APOBEC deaminase incorporated into a base editor can comprise an APOBEC deaminase comprising a R126A mutation of rAPOBEC1, or one or more corresponding mutations in another APOBEC deaminase. In some embodiments, an APOBEC deaminase incorporated into a base editor can comprise an APOBEC deaminase comprising a R126E mutation of rAPOBEC1, or one or more corresponding mutations in another APOBEC deaminase. In some embodiments, an APOBEC deaminase incorporated into a base editor can comprise an APOBEC deaminase comprising a R118A mutation of rAPOBEC1, or one or more corresponding mutations in another APOBEC deaminase. In some embodiments, an APOBEC deaminase incorporated into a base editor can comprise an APOBEC deaminase comprising a W90A mutation of rAPOBEC1, or one or more corresponding mutations in another APOBEC deaminase. In some embodiments, an APOBEC deaminase incorporated into a base editor can comprise an APOBEC deaminase comprising a W90Y mutation of rAPOBEC1, or one or more corresponding mutations in another APOBEC deaminase. In some embodiments, an APOBEC deaminase incorporated into a base editor can comprise an APOBEC deaminase comprising a R132E mutation of rAPOBEC1, or one or more corresponding mutations in another APOBEC deaminase. In some embodiments an APOBEC deaminase incorporated into a base editor can comprise an APOBEC deaminase comprising a W90Y and a R126E mutation of rAPOBEC1, or one or more corresponding mutations in another APOBEC deaminase. In some embodiments, an APOBEC deaminase incorporated into a base editor can comprise an APOBEC deaminase comprising a R126E and a R132E mutation of rAPOBEC1, or one or more corresponding mutations in another APOBEC deaminase. In some embodiments, an APOBEC deaminase incorporated into a base editor can comprise an APOBEC deaminase comprising a W90Y and a R132E mutation of rAPOBEC1, or one or more corresponding mutations in another APOBEC deaminase. In some embodiments, an APOBEC deaminase incorporated into a base editor can comprise an APOBEC deaminase comprising a W90Y, R126E, and R132E mutation of rAPOBEC1, or one or more corresponding mutations in another APOBEC deaminase.

[0560] In some embodiments, an APOBEC deaminase incorporated into a base editor can comprise an APOBEC deaminase comprising a D316R and a D317R mutation of hAPOBEC3G, or one or more corresponding mutations in another APOBEC deaminase. In some embodiments, any of the fusion proteins provided herein comprise an APOBEC deaminase comprising a R320A mutation of hAPOBEC3G, or one or more corresponding mutations in another APOBEC deaminase. In some embodiments, an APOBEC deaminase incorporated into a base editor can comprise an APOBEC deaminase comprising a R320E mutation of hAPOBEC3G, or one or more corresponding mutations in another APOBEC deaminase. In some embodiments, an APOBEC deaminase incorporated into a base editor can comprise an APOBEC deaminase comprising a R313A mutation of hAPOBEC3G, or one or more corresponding mutations in another APOBEC deaminase. In some embodiments, an APOBEC deaminase incorporated into a base editor can comprise an APOBEC deaminase comprising a W285A mutation of hAPOBEC3G, or one or more corresponding mutations in another APOBEC deaminase. In some embodiments, an APOBEC deaminase incorporated into a base editor can comprise an APOBEC deaminase comprising a W285Y mutation of hAPOBEC3G, or one or more corresponding mutations in another APOBEC deaminase. In some embodiments, an APOBEC deaminase incorporated into a base editor can comprise an APOBEC deaminase comprising a R326E mutation of hAPOBEC3G, or one or more corresponding mutations in another APOBEC deaminase. In some embodiments, an APOBEC deaminase incorporated into a base editor can comprise an APOBEC deaminase comprising a W285Y and a R320E mutation of hAPOBEC3G, or one or more corresponding mutations in another APOBEC deaminase. In some embodiments, an APOBEC deaminase incorporated into a base editor can comprise an APOBEC deaminase comprising a R320E and a R326E mutation of hAPOBEC3G, or one or more corresponding mutations in another APOBEC deaminase. In some embodiments, an APOBEC deaminase incorporated into a base editor can comprise an APOBEC deaminase comprising a W285Y and a R326E mutation of hAPOBEC3G, or one or more corresponding mutations in another APOBEC deaminase. In some embodiments, an APOBEC deaminase incorporated into a base editor can comprise an APOBEC deaminase comprising a W285Y, R320E, and R326E mutation of hAPOBEC3G, or one or more corresponding mutations in another APOBEC deaminase.

[0561] A number of modified cytidine deaminases are commercially available, including, but not limited to, SaBE3, SaKKH-BE3, VQR-BE3, EQR-BE3, VRER-BE3, YE1-BE3, EE-BE3, YE2-BE3, and YEE-BE3, which are available from Addgene (plasmids 85169, 85170, 85171, 85172, 85173, 85174, 85175, 85176, 85177). In some embodiments, a deaminase incorporated into a base editor comprises all or a portion of an APOBEC1 deaminase.

[0562] Details of C to T nucleobase editing proteins are described in International PCT Application No. PCT/US2016/058344 (WO2017/070632) and Komor, A. C., et al., “Programmable editing of a target base in genomic DNA without double-stranded DNA cleavage” Nature 533, 420-424 (2016), the entire contents of which are hereby incorporated by reference.

### Cytidine Deaminases

[0563] The fusion proteins provided herein comprise one or more cytidine deaminases. In some embodiments, the cytidine deaminases provided herein are capable of deaminating cytosine or 5-methylcytosine to uracil or thymine. In some embodiments, the cytidine deaminases provided herein are capable of deaminating cytosine in DNA. The cytidine deaminase may be derived from any suitable organism. In some embodiments, the cytidine deaminase is a naturally-occurring cytidine deaminase that includes one or more mutations corresponding to any of the mutations provided herein. One of skill in the art will be able to identify the corresponding residue in any homologous protein, e.g., by sequence alignment and determination of homologous residues. Accordingly, one of skill in the art would be able to generate mutations in any naturally-occurring cytidine deaminase that corresponds to any of the mutations described herein. In some embodiments, the cytidine deaminase is from a prokaryote. In some embodiments, the cytidine deaminase is from a bacterium. In some embodiments, the cytidine deaminase is from a mammal (e.g., human).

[0564] In some embodiments, the cytidine deaminase comprises an amino acid sequence that is at least 60%, at least 65%, at least 70%, at least 75%, at least 80%, at least 85%, at least 90%, at least 95%, at least 96%, at least 97%, at least 98%, at least 99%, or at least 99.5% identical to any one of the cytidine deaminase amino acid sequences set forth herein. It should be appreciated that cytidine deaminases provided herein may include one or more mutations (e.g., any of the mutations provided herein). The disclosure provides any deaminase domains with a certain percent identity plus any of the mutations or combinations thereof described herein. In some embodiments, the cytidine deaminase comprises an amino acid sequence that has 1, 2, 3, 4, 5, 6, 7, 8, 9, 10, 11, 12, 13, 14, 15, 16, 17, 18, 19, 20, 21, 22, 21, 24, 25, 26, 27, 28, 29, 30, 31, 32, 33, 34, 35, 36, 37, 38, 39, 40, 41, 42, 43, 44, 45, 46, 47, 48, 49, 50, or more mutations compared to a reference sequence, or any of the cytidine deaminases provided herein. In some embodiments, the cytidine deaminase comprises an amino acid sequence that has at least 5, at least 10, at least 15, at least 20, at least 25, at least 30, at least 35, at least 40, at least 45, at least 50, at least 60, at least 70, at least 80, at least 90, at least 100, at least 110, at least 120, at least 130, at least 140, at least 150, at least 160, or at least 170 identical contiguous amino acid residues as compared to any one of the amino acid sequences known in the art or described herein.

[0565] A fusion protein of the invention comprises two or more nucleic acid editing domains. In some embodiments, the nucleic acid editing domain can catalyze a C to U base change. In some embodiments, the nucleic acid editing domain is a deaminase domain. In some embodiments, the deaminase is a cytidine deaminase or an adenosine deaminase. In some embodiments, the deaminase is an apolipoprotein B mRNA-editing complex (APOBEC) family deaminase. In some embodiments, the deaminase is an APOBEC1 deaminase. In some embodiments, the deaminase is an APOBEC2 deaminase. In some embodiments, the deaminase is an APOBEC3 deaminase. In some embodiments, the deaminase is an APOBEC3 A deaminase. In some embodiments, the deaminase is an APOBEC3B deaminase. In some embodiments, the deaminase is an APOBEC3C deaminase. In some embodiments, the deaminase is an APOBEC3D deaminase. In some embodiments, the deaminase is an APOBEC3E deaminase. In some embodiments, the deaminase is an APOBEC3F deaminase. In some embodiments, the deaminase is an APOBEC3G deaminase. In some embodiments, the deaminase is an APOBEC3H deaminase. In some embodiments, the deaminase is an APOBEC4 deaminase. In some embodiments, the deaminase is an activation-induced deaminase (AID). In some embodiments, the deaminase is a vertebrate deaminase. In some embodiments, the deaminase is an invertebrate deaminase. In some embodiments, the deaminase is a human, chimpanzee, gorilla, monkey, cow, dog, rat, or mouse deaminase. In some embodiments, the deaminase is a human deaminase. In some embodiments, the deaminase is a rat deaminase, e.g., rAPOBEC1. In some embodiments, the deaminase is a Petromyzon marinus cytidine deaminase 1 (pmCDA1). In some embodiments, the deaminase is a human APOBEC3G. In some embodiments, the deaminase is a fragment of the human APOBEC3G. In some embodiments, the deaminase is a human APOBEC3G variant comprising a D316R D317R mutation. In some embodiments, the deaminase is a fragment of the human APOBEC3G and comprises mutations corresponding to the D316R D317R mutations. In some embodiments, the nucleic acid editing domain is at least 80%, at least 85%, at least 90%, at least 92%, at least 95%, at least 96%, at least 97%, at least 98%, at least 99%), or at least 99.5% identical to the deaminase domain of any deaminase described herein.

[0566] In certain embodiments, the fusion proteins provided herein comprise one or more features that improve the base editing activity of the fusion proteins. For example, any of the fusion proteins provided herein may comprise a Cas9 domain that has reduced nuclease activity. In some embodiments, any of the fusion proteins provided herein may have a Cas9 domain that does not have nuclease activity (dCas9), or a Cas9 domain that cuts one strand of a duplexed DNA molecule, referred to as a Cas9 nickase (nCas9).

Cas9 Complexes with Guide RNAs

[0567] Some aspects of this disclosure provide complexes comprising any of the fusion proteins provided herein, and a guide RNA bound to a Cas9 domain (e.g., a dCas9, a nuclease active Cas9, or a Cas9 nickase) of fusion protein. In some embodiments, the guide nucleic acid (e.g., guide RNA) is from 15-100 nucleotides long and comprises a sequence of at least 10 contiguous nucleotides that is complementary to a target sequence. In some embodiments, the guide RNA is 15, 16, 17, 18, 19, 20, 21, 22, 23, 24, 25, 26, 27, 28, 29, 30, 31, 32, 33, 34, 35, 36, 37, 38, 39, 40, 41, 42, 43, 44, 45, 46, 47, 48, 49, or 50 nucleotides long. In some embodiments, the guide RNA comprises a sequence of 15, 16, 17, 18, 19, 20, 21, 22, 23, 24, 25, 26, 27, 28, 29, 30, 31, 32, 33, 34, 35, 36, 37, 38, 39, or 40 contiguous nucleotides that is complementary to a target sequence. In some embodiments, the target sequence is a DNA sequence. In some embodiments, the target sequence is a sequence in the genome of a bacteria, yeast, fungi, insect, plant, or animal. In some embodiments, the target sequence is a sequence in the genome of a human. In some embodiments, the 3′ end of the target sequence is immediately adjacent to a canonical PAM sequence (NGG). In some embodiments, the 3′ end of the target sequence is immediately adjacent to a non-canonical PAM sequence (e.g., a sequence listed in Table 1 or 5′-NAA-3′). In some embodiments, the guide nucleic acid (e.g., guide RNA) is complementary to a sequence in a gene of interest (e.g., a gene in the HBV genome).

[0568] Some aspects of this disclosure provide methods of using the fusion proteins, or complexes provided herein. For example, some aspects of this disclosure provide methods comprising contacting a DNA molecule with any of the fusion proteins provided herein, and with at least one guide RNA, wherein the guide RNA is about 15-100 nucleotides long and comprises a sequence of at least 10 contiguous nucleotides that is complementary to a target sequence. In some embodiments, the 3′ end of the target sequence is immediately adjacent to an AGC, GAG, TTT, GTG, or CAA sequence. In some embodiments, the 3′ end of the target sequence is immediately adjacent to an NGA, NGCG, NGN, NNGRRT, NNNRRT, NGCG, NGCN, NGTN, NGTN, NGTN, or 5′ (TTTV) sequence.

[0569] It will be understood that the numbering of the specific positions or residues in the respective sequences depends on the particular protein and numbering scheme used. Numbering might be different, e.g., in precursors of a mature protein and the mature protein itself, and differences in sequences from species to species may affect numbering. One of skill in the art will be able to identify the respective residue in any homologous protein and in the respective encoding nucleic acid by methods well known in the art, e.g., by sequence alignment and determination of homologous residues.

[0570] It will be apparent to those of skill in the art that in order to target any of the fusion proteins disclosed herein, to a target site, e.g., a site comprising a mutation to be edited, it is typically necessary to co-express the fusion protein together with a guide RNA. As explained in more detail elsewhere herein, a guide RNA typically comprises a tracrRNA framework allowing for Cas9 binding, and a guide sequence, which confers sequence specificity to the Cas9:nucleic acid editing enzyme/domain fusion protein. Alternatively, the guide RNA and tracrRNA may be provided separately, as two nucleic acid molecules. In some embodiments, the guide RNA comprises a structure, wherein the guide sequence comprises a sequence that is complementary to the target sequence. The guide sequence is typically 20 nucleotides long. The sequences of suitable guide RNAs for targeting Cas9:nucleic acid editing enzyme/domain fusion proteins to specific genomic target sites will be apparent to those of skill in the art based on the instant disclosure. Such suitable guide RNA sequences typically comprise guide sequences that are complementary to a nucleic sequence within 50 nucleotides upstream or downstream of the target nucleotide to be edited. Some exemplary guide RNA sequences suitable for targeting any of the provided fusion proteins to specific target sequences are provided herein.

### Additional Domains

[0571] A base editor described herein can include any domain which helps to facilitate the nucleobase editing, modification or altering of a nucleobase of a polynucleotide. In some embodiments, a base editor comprises a polynucleotide programmable nucleotide binding domain (e.g., Cas9), a nucleobase editing domain (e.g., deaminase domain), and one or more additional domains. In some cases, the additional domain can facilitate enzymatic or catalytic functions of the base editor, binding functions of the base editor, or be inhibitors of cellular machinery (e.g., enzymes) that could interfere with the desired base editing result. In some embodiments, a base editor can comprise a nuclease, a nickase, a recombinase, a deaminase, a methyltransferase, a methylase, an acetylase, an acetyltransferase, a transcriptional activator, or a transcriptional repressor domain.

[0572] In some embodiments, a base editor can comprise a uracil glycosylase inhibitor (UGI) domain. A UGI domain can for example improve the efficiency of base editors comprising a cytidine deaminase domain by inhibiting the conversion of a U formed by deamination of a C back to the C nucleobase. In some cases, cellular DNA repair response to the presence of U:G heteroduplex DNA can be responsible for a decrease in nucleobase editing efficiency in cells. In such cases, uracil DNA glycosylase (UDG) can catalyze removal of U from DNA in cells, which can initiate base excision repair (BER), mostly resulting in reversion of the U:G pair to a C:G pair. In such cases, BER can be inhibited in base editors comprising one or more domains that bind the single strand, block the edited base, inhibit UGI, inhibit BER, protect the edited base, and/or promote repairing of the non-edited strand. Thus, this disclosure contemplates a base editor fusion protein comprising a UGI domain.

[0573] In some embodiments, a base editor comprises as a domain all or a portion of a double-strand break (DSB) binding protein. For example, a DSB binding protein can include a Gam protein of bacteriophage Mu that can bind to the ends of DSBs and can protect them from degradation. See Komor, A. C., et al., “Improved base excision repair inhibition and bacteriophage Mu Gam protein yields C:G-to-T:A base editors with higher efficiency and product purity” Science Advances 3:eaao4774 (2017), the entire content of which is hereby incorporated by reference.

[0574] Additionally, in some embodiments, a Gam protein can be fused to an N terminus of a base editor. In some embodiments, a Gam protein can be fused to a C-terminus of a base editor. The Gam protein of bacteriophage Mu can bind to the ends of double strand breaks (DSBs) and protect them from degradation. In some embodiments, using Gam to bind the free ends of DSB can reduce indel formation during the process of base editing. In some embodiments, 174-residue Gam protein is fused to the N terminus of the base editors. See. Komor, A. C., et al., “Improved base excision repair inhibition and bacteriophage Mu Gam protein yields C:G-to-T:A base editors with higher efficiency and product purity” Science Advances 3:eaao4774 (2017). In some embodiments, a mutation or mutations can change the length of a base editor domain relative to a wild-type domain. For example, a deletion of at least one amino acid in at least one domain can reduce the length of the base editor. In another case, a mutation or mutations do not change the length of a domain relative to a wild-type domain. For example, substitution(s) in any domain does/do not change the length of the base editor.

[0575] In some embodiments, a base editor can comprise as a domain all or a portion of a nucleic acid polymerase (NAP). For example, a base editor can comprise all or a portion of a eukaryotic NAP. In some embodiments, a NAP or portion thereof incorporated into a base editor is a DNA polymerase. In some embodiments, a NAP or portion thereof incorporated into a base editor has translesion polymerase activity. In some cases, a NAP or portion thereof incorporated into a base editor is a translesion DNA polymerase. In some embodiments, a NAP or portion thereof incorporated into a base editor is a Rev7, Rev1 complex, polymerase iota, polymerase kappa, or polymerase eta. In some embodiments, a NAP or portion thereof incorporated into a base editor is a eukaryotic polymerase alpha, beta, gamma, delta, epsilon, gamma, eta, iota, kappa, lambda, mu, or nu component. In some embodiments, a NAP or portion thereof incorporated into a base editor comprises an amino acid sequence that is at least 75%, 80%, 85%, 90%, 95%, 96%, 97%, 98%, 99%, or 99.5% identical to a nucleic acid polymerase (e.g., a translesion DNA polymerase).

### Base Editor System

[0576] The base editor system provided herein comprises the steps of: (a) contacting a target nucleotide sequence of a polynucleotide (e.g., a double-stranded DNA or RNA, a single-stranded DNA or RNA) of a subject with a base editor system comprising an adenosine deaminase domain or a cytidine deaminase domain, wherein the aforementioned domains are fused to a polynucleotide binding domain, thereby forming a nucleobase editor capable of inducing changes at one or more bases within a nucleic acid molecule as described herein and at least one guide polynucleic acid (e.g., gRNA), wherein the target nucleotide sequence comprises a targeted nucleobase pair; (b) inducing strand separation of the target region; (c) converting a first nucleobase of the target nucleobase pair in a single strand of the target region to a second nucleobase; and (d) cutting no more than one strand of the target region, where a third nucleobase complementary to the first nucleobase base is replaced by a fourth nucleobase complementary to the second nucleobase. It should be appreciated that in some embodiments, step (b) is omitted. In some embodiments, the targeted nucleobase pair is a plurality of nucleobase pairs in one or more genes. In some embodiments, the base editor system provided herein is capable of multiplex editing of a plurality of nucleobase pairs in one or more genes. In some embodiments, the plurality of nucleobase pairs is located in the same gene. In some embodiments, the plurality of nucleobase pairs is located in one or more genes, wherein at least one gene is located in a different locus.

[0577] In some embodiments, the cut single strand (nicked strand) is hybridized to the guide nucleic acid. In some embodiments, the cut single strand is opposite to the strand comprising the first nucleobase. In some embodiments, the base editor comprises a Cas9 domain. In some embodiments, the first base is adenine, and the second base is not a G, C, A, or T. In some embodiments, the second base is inosine.

[0578] Base editing system as provided herein provides a new approach to genome editing that uses a fusion protein containing a catalytically defective Streptococcus pyogenes Cas9, a cytidine deaminase, and an inhibitor of base excision repair to induce programmable, single nucleotide (C→T or A→G) changes in DNA without generating double-strand DNA breaks, without requiring a donor DNA template, and without inducing an excess of stochastic insertions and deletions.

[0579] Provided herein are systems, compositions, and methods for editing a nucleobase using a base editor system. In some embodiments, the base editor system comprises a base editor (BE) comprising a polynucleotide programmable nucleotide binding domain and a nucleobase editing domain (e.g., deaminase domain) for editing the nucleobase; and a guide polynucleotide (e.g., guide RNA) in conjunction with the polynucleotide programmable nucleotide binding domain. In some embodiments, the base editor system comprises a base editor (BE) comprising a polynucleotide programmable nucleotide binding domain and a nucleobase editing domain (e.g., deaminase domain) for editing the nucleobase, and a guide polynucleotide (e.g., guide RNA) in conjunction with the polynucleotide programmable nucleotide binding domain. In some embodiments, the polynucleotide programmable nucleotide binding domain is a polynucleotide programmable DNA binding domain. In some embodiments, the polynucleotide programmable nucleotide binding domain is a polynucleotide programmable RNA binding domain. In some cases, a deaminase domain can be a cytosine deaminase or a cytidine deaminase, an adenine deaminase or an adenosine deaminase. In some embodiments, the terms “cytosine deaminase” and “cytidine deaminase” can be used interchangeably. In some embodiments, the terms “adenine deaminase” and “adenosine deaminase” can be used interchangeably. In some cases, a deaminase domain can be a cytosine deaminase or a cytidine deaminase. In some cases, a deaminase domain can be an adenine deaminase or an adenosine deaminase.

[0580] Details of nucleobase editing proteins are described in International PCT Application Nos. PCT/2017/045381 (WO2018/027078) and PCT/US2016/058344 (WO2017/070632), each of which is incorporated herein by reference for its entirety. Also see Komor, A. C., et al., “Programmable editing of a target base in genomic DNA without double-stranded DNA cleavage” Nature 533, 420-424 (2016); Gaudelli, N. M., et al., “Programmable base editing of A·T to G·C in genomic DNA without DNA cleavage” Nature 551, 464-471 (2017); and Komor, A. C., et al., “Improved base excision repair inhibition and bacteriophage Mu Gam protein yields C:G-to-T:A base editors with higher efficiency and product purity” Science Advances 3:eaao4774 (2017), the entire contents of which are hereby incorporated by reference.

[0581] In some embodiments, a single guide polynucleotide may be utilized to target a deaminase to a target nucleic acid sequence. In some embodiments, a single pair of guide polynucleotides may be utilized to target different deaminases to a target nucleic acid sequence. The nucleobase components and the polynucleotide programmable nucleotide binding component of a base editor system may be associated with each other covalently or non-covalently. For example, in some embodiments, the deaminase domain can be targeted to a target nucleotide sequence by a polynucleotide programmable nucleotide binding domain. In some embodiments, a polynucleotide programmable nucleotide binding domain can be fused or linked to a deaminase domain. In some embodiments, a polynucleotide programmable nucleotide binding domain can target a deaminase domain to a target nucleotide sequence by non-covalently interacting with or associating with the deaminase domain. For example, in some embodiments, the nucleobase editing component, e.g., the deaminase component can comprise an additional heterologous portion or domain that is capable of interacting with, associating with, or capable of forming a complex with an additional heterologous portion or domain that is part of a polynucleotide programmable nucleotide binding domain. In some embodiments, the additional heterologous portion may be capable of binding to, interacting with, associating with, or forming a complex with a polypeptide. In some embodiments, the additional heterologous portion may be capable of binding to, interacting with, associating with, or forming a complex with a polynucleotide. In some embodiments, the additional heterologous portion may be capable of binding to a guide polynucleotide. In some embodiments, the additional heterologous portion may be capable of binding to a polypeptide linker. In some embodiments, the additional heterologous portion may be capable of binding to a polynucleotide linker. The additional heterologous portion may be a protein domain. In some embodiments, the additional heterologous portion may be a K Homology (KH) domain, a MS2 coat protein domain, a PP7 coat protein domain, a SfMu Com coat protein domain, a steril alpha motif, a telomerase Ku binding motif and Ku protein, a telomerase Sm7 binding motif and Sm7 protein, or a RNA recognition motif.

[0582] A base editor system may further comprise a guide polynucleotide component. It should be appreciated that components of the base editor system may be associated with each other via covalent bonds, noncovalent interactions, or any combination of associations and interactions thereof. In some embodiments, a deaminase domain can be targeted to a target nucleotide sequence by a guide polynucleotide. For example, in some embodiments, the nucleobase editing component of the base editor system, e.g., the deaminase component, can comprise an additional heterologous portion or domain (e.g., polynucleotide binding domain such as an RNA or DNA binding protein) that is capable of interacting with, associating with, or capable of forming a complex with a portion or segment (e.g., a polynucleotide motif) of a guide polynucleotide. In some embodiments, the additional heterologous portion or domain (e.g., polynucleotide binding domain such as an RNA or DNA binding protein) can be fused or linked to the deaminase domain. In some embodiments, the additional heterologous portion may be capable of binding to, interacting with, associating with, or forming a complex with a polypeptide. In some embodiments, the additional heterologous portion may be capable of binding to, interacting with, associating with, or forming a complex with a polynucleotide. In some embodiments, the additional heterologous portion may be capable of binding to a guide polynucleotide. In some embodiments, the additional heterologous portion may be capable of binding to a polypeptide linker. In some embodiments, the additional heterologous portion may be capable of binding to a polynucleotide linker. The additional heterologous portion may be a protein domain. In some embodiments, the additional heterologous portion may be a K Homology (KH) domain, a MS2 coat protein domain, a PP7 coat protein domain, a SfMu Com coat protein domain, a sterile alpha motif, a telomerase Ku binding motif and Ku protein, a telomerase Sm7 binding motif and Sm7 protein, or a RNA recognition motif.

[0583] In some embodiments, a base editor system can further comprise an inhibitor of base excision repair (BER) component. It should be appreciated that components of the base editor system may be associated with each other via covalent bonds, noncovalent interactions, or any combination of associations and interactions thereof. The inhibitor of BER component may comprise a base excision repair inhibitor. In some embodiments, the inhibitor of base excision repair can be a uracil DNA glycosylase inhibitor (UGI). In some embodiments, the inhibitor of base excision repair can be an inosine base excision repair inhibitor. In some embodiments, the inhibitor of base excision repair can be targeted to the target nucleotide sequence by the polynucleotide programmable nucleotide binding domain. In some embodiments, a polynucleotide programmable nucleotide binding domain can be fused or linked to an inhibitor of base excision repair. In some embodiments, a polynucleotide programmable nucleotide binding domain can be fused or linked to a deaminase domain and an inhibitor of base excision repair. In some embodiments, a polynucleotide programmable nucleotide binding domain can target an inhibitor of base excision repair to a target nucleotide sequence by non-covalently interacting with or associating with the inhibitor of base excision repair. For example, in some embodiments, the inhibitor of base excision repair component can comprise an additional heterologous portion or domain that is capable of interacting with, associating with, or capable of forming a complex with an additional heterologous portion or domain that is part of a polynucleotide programmable nucleotide binding domain. In some embodiments, the inhibitor of base excision repair can be targeted to the target nucleotide sequence by the guide polynucleotide. For example, in some embodiments, the inhibitor of base excision repair can comprise an additional heterologous portion or domain (e.g., polynucleotide binding domain such as an RNA or DNA binding protein) that is capable of interacting with, associating with, or capable of forming a complex with a portion or segment (e.g., a polynucleotide motif) of a guide polynucleotide. In some embodiments, the additional heterologous portion or domain of the guide polynucleotide (e.g., polynucleotide binding domain such as an RNA or DNA binding protein) can be fused or linked to the inhibitor of base excision repair. In some embodiments, the additional heterologous portion may be capable of binding to, interacting with, associating with, or forming a complex with a polynucleotide. In some embodiments, the additional heterologous portion may be capable of binding to a guide polynucleotide. In some embodiments, the additional heterologous portion may be capable of binding to a polypeptide linker. In some embodiments, the additional heterologous portion may be capable of binding to a polynucleotide linker. The additional heterologous portion may be a protein domain. In some embodiments, the additional heterologous portion may be a K Homology (KH) domain, a MS2 coat protein domain, a PP7 coat protein domain, a SfMu Com coat protein domain, a sterile alpha motif, a telomerase Ku binding motif and Ku protein, a telomerase Sm7 binding motif and Sm7 protein, or a RNA recognition motif.

[0584] In some embodiments, the base editor inhibits base excision repair of the edited strand. In some embodiments, the base editor protects or binds the non-edited strand. In some embodiments, the base editor comprises UGI activity. In some embodiments, the base editor comprises a catalytically inactive inosine-specific nuclease. In some embodiments, the base editor comprises nickase activity. In some embodiments, the intended edit of base pair is upstream of a PAM site. In some embodiments, the intended edit of base pair is 1, 2, 3, 4, 5, 6, 7, 8, 9, 10, 11, 12, 13, 14, 15, 16, 17, 18, 19, or 20 nucleotides upstream of the PAM site. In some embodiments, the intended edit of base-pair is downstream of a PAM site. In some embodiments, the intended edited base pair is 1, 2, 3, 4, 5, 6, 7, 8, 9, 10, 11, 12, 13, 14, 15, 16, 17, 18, 19, or 20 nucleotides downstream stream of the PAM site.

[0585] In some embodiments, the method does not require a canonical (e.g., NGG) PAM site. In some embodiments, the nucleobase editor comprises a linker or a spacer. In some embodiments, the linker or spacer is 1-25 amino acids in length. In some embodiments, the linker or spacer is 5-20 amino acids in length. In some embodiments, the linker or spacer is 10, 11, 12, 13, 14, 15, 16, 17, 18, 19, or 20 amino acids in length.

[0586] In some embodiments, the target region comprises a target window, wherein the target window comprises the target nucleobase pair. In some embodiments, the target window comprises 1-10 nucleotides. In some embodiments, the target window is 1, 2, 3, 4, 5, 6, 7, 8, 9, 10, 11, 12, 13, 14, 15, 16, 17, 18, 19, or 20 nucleotides in length. In some embodiments, the intended edit of base pair is within the target window. In some embodiments, the target window comprises the intended edit of base pair. In some embodiments, the method is performed using any of the base editors provided herein. In some embodiments, a target window is a deamination window.

[0587] In some embodiments, non-limiting exemplary cytidine base editors (CBE) include BE1 (APOBEC1-XTEN-dCas9), BE2 (APOBEC1-XTEN-dCas9-UGI), BE3 (APOBEC1-XTEN-dCas9(A840H)-UGI), BE3-Gam, saBE3, saBE4-Gam, BE4, BE4-Gam, saBE4, or saB4E-Gam. BE4 extends the APOBEC1-Cas9n(D10A) linker to 32 amino acids and the Cas9n-UGI linker to 9 amino acids, and appends a second copy of UGI to the C-terminus of the construct with another 9-amino acid linker into a single base editor construct. The base editors saBE3 and saBE4 have the S. pyogenes Cas9n(D10A) replaced with the smaller S. aureus Cas9n(D10A). BE3-Gam, saBE3-Gam, BE4-Gam, and saBE4-Gam have 174 residues of Gam protein fused to the N-terminus of BE3, saBE3, BE4, and saBE4 via the 16 amino acid XTEN linker.

[0588] In some embodiments, the adenosine base editor (ABE) can deaminate adenine in DNA. In some embodiments, ABE is generated by replacing APOBEC1 component of BE3 with natural or engineered E. coli TadA, human ADAR2, mouse ADA, or human ADAT2. In some embodiments, ABE comprises an evolved TadA variant. In some embodiments, the ABE is ABE 1.2 (TadA*-XTEN-nCas9-NLS). In some embodiments, TadA* comprises A106V and D108N mutations.

[0589] In some embodiments, the ABE is a second-generation ABE. In some embodiments, the ABE is ABE2.1, which comprises additional mutations D147Y and E155V in TadA* (TadA*2.1). In some embodiments, the ABE is ABE2.2, ABE2.1 fused to catalytically inactivated version of human alkyl adenine DNA glycosylase (AAG with E125Q mutation). In some embodiments, the ABE is ABE2.3, ABE2.1 fused to catalytically inactivated version of E. coli Endo V (inactivated with D35A mutation). In some embodiments, the ABE is ABE2.6 which has a linker twice as long (32 amino acids, (SGGS)₂-XTEN-(SGGS)₂) as the linker in ABE2.1. In some embodiments, the ABE is ABE2.7, which is ABE2.1 tethered with an additional wild-type TadA monomer. In some embodiments, the ABE is ABE2.8, which is ABE2.1 tethered with an additional TadA*2.1 monomer. In some embodiments, the ABE is ABE2.9, which is a direct fusion of evolved TadA (TadA*2.1) to the N-terminus of ABE2.1. In some embodiments, the ABE is ABE2.10, which is a direct fusion of wild type TadA to the N-terminus of ABE2.1. In some embodiments, the ABE is ABE2.11, which is ABE2.9 with an inactivating E59A mutation at the N-terminus of TadA* monomer. In some embodiments, the ABE is ABE2.12, which is ABE2.9 with an inactivating E59A mutation in the internal TadA* monomer.

[0590] In some embodiments, the ABE is a third generation ABE. In some embodiments, the ABE is ABE3.1, which is ABE2.3 with three additional TadA mutations (L84F, H123Y, and I157F).

[0591] In some embodiments, the ABE is a fourth generation ABE. In some embodiments, the ABE is ABE4.3, which is ABE3.1 with an additional TadA mutation A142N (TadA*4.3).

[0592] In some embodiments, the ABE is a fifth generation ABE. In some embodiments, the ABE is ABE5.1, which is generated by importing a consensus set of mutations from surviving clones (H36L, R51L, S146C, and K157N) into ABE3.1. In some embodiments, the ABE is ABE5.3, which has a heterodimeric construct containing wild-type E. coli TadA fused to an internal evolved TadA*. In some embodiments, the ABE is ABE5.2, ABE5.4, ABE5.5, ABE5.6, ABE5.7, ABE5.8, ABE5.9, ABE5.10, ABE5.11, ABE5.12, ABE5.13, or ABE5.14, as shown in below Table 7. In some embodiments, the ABE is a sixth generation ABE. In some embodiments, the ABE is ABE6.1, ABE6.2, ABE6.3, ABE6.4, ABE6.5, or ABE6.6, as shown in below Table 7. In some embodiments, the ABE is a seventh generation ABE. In some embodiments, the ABE is ABE7.1, ABE7.2, ABE7.3, ABE7.4, ABE7.5, ABE7.6, ABE7.7, ABE7.8, ABE 7.9, or ABE7.10, as shown in Table 7 below.

TABLE 7
Genotypes of ABEs

| | 23 | 26 | 36 | 37 | 48 | 49 | 51 | 72 | 84 | 87 | 106 | 108 | 123 | 125 | 142 | 146 | 147 | 152 | 155 | 156 | 157 | 161 |
|---|---|---|---|---|---|---|---|---|---|---|---|---|---|---|---|---|---|---|---|---|---|---|
| ABE0.1 | W | R | H | N | P | | R | N | L | S | A | D | H | G | A | S | D | R | E | I | K | K |
| ABE0.2 | W | R | H | N | P | | R | N | L | S | A | D | H | G | A | S | D | R | E | I | K | K |
| ABE1.1 | W | R | H | N | P | | R | N | L | S | A | N | H | G | A | S | D | R | E | I | K | K |
| ABE1.2 | W | R | H | N | P | | R | N | L | S | V | N | H | G | A | S | D | R | E | I | K | K |
| ABE2.1 | W | R | H | N | P | | R | N | L | S | V | N | H | G | A | S | Y | R | V | I | K | K |
| ABE2.2 | W | R | H | N | P | | R | N | L | S | V | N | H | G | A | S | Y | R | V | I | K | K |
| ABE2.3 | W | R | H | N | P | | R | N | L | S | V | N | H | G | A | S | Y | R | V | I | K | K |
| ABE2.4 | W | R | H | N | P | | R | N | L | S | V | N | H | G | A | S | Y | R | V | I | K | K |
| ABE2.5 | W | R | H | N | P | | R | N | L | S | V | N | H | G | A | S | Y | R | V | I | K | K |
| ABE2.6 | W | R | H | N | P | | R | N | L | S | V | N | H | G | A | S | Y | R | V | I | K | K |
| ABE2.7 | W | R | H | N | P | | R | N | L | S | V | N | H | G | A | S | Y | R | V | I | K | K |
| ABE2.8 | W | R | H | N | P | | R | N | L | S | V | N | H | G | A | S | Y | R | V | I | K | K |
| ABE2.9 | W | R | H | N | P | | R | N | L | S | V | N | H | G | A | S | Y | R | V | I | K | K |
| ABE2.10 | W | R | H | N | P | | R | N | L | S | V | N | H | G | A | S | Y | R | V | I | K | K |
| ABE2.11 | W | R | H | N | P | | R | N | L | S | V | N | H | G | A | S | Y | R | V | I | K | K |
| ABE2.12 | W | R | H | N | P | | R | N | L | S | V | N | H | G | A | S | Y | R | V | I | K | K |
| ABE3.1 | W | R | H | N | P | | R | N | F | S | V | N | Y | G | A | S | Y | R | V | F | K | K |
| ABE3.2 | W | R | H | N | P | | R | N | F | S | V | N | Y | G | A | S | Y | R | V | F | K | K |
| ABE3.3 | W | R | H | N | P | | R | N | F | S | V | N | Y | G | A | S | Y | R | V | F | K | K |
| ABE3.4 | W | R | H | N | P | | R | N | F | S | V | N | Y | G | A | S | Y | R | V | F | K | K |
| ABE3.5 | W | R | H | N | P | | R | N | F | S | V | N | Y | G | A | S | Y | R | V | F | K | K |
| ABE3.6 | W | R | H | N | P | | R | N | F | S | V | N | Y | G | A | S | Y | R | V | F | K | K |
| ABE3.7 | W | R | H | N | P | | R | N | F | S | V | N | Y | G | A | S | Y | R | V | F | K | K |
| ABE3.8 | W | R | H | N | P | | R | N | F | S | V | N | Y | G | A | S | Y | R | V | F | K | K |
| ABE4.1 | W | R | H | N | P | | R | N | L | S | V | N | H | G | N | S | Y | R | V | I | K | K |
| ABE4.2 | W | G | H | N | P | | R | N | L | S | V | N | H | G | N | S | Y | R | V | I | K | K |
| ABE4.3 | W | R | H | N | P | | R | N | F | S | V | N | Y | G | N | S | Y | R | V | F | K | K |
| ABE5.1 | W | R | L | N | P | | L | N | F | S | V | N | Y | G | A | C | Y | R | V | F | N | K |
| ABE5.2 | W | R | H | S | P | | R | N | F | S | V | N | Y | G | A | S | Y | R | V | F | K | T |
| ABE5.3 | W | R | L | N | P | | L | N | I | S | V | N | Y | G | A | C | Y | R | V | F | N | K |
| ABE5.4 | W | R | H | S | P | | R | N | F | S | V | N | Y | G | A | S | Y | R | V | F | K | T |
| ABE5.5 | W | R | L | N | P | | L | N | F | S | V | N | Y | G | A | C | Y | R | V | F | N | K |
| ABE5.6 | W | R | L | N | P | | L | N | F | S | V | N | Y | G | A | C | Y | R | V | F | N | K |
| ABE5.7 | W | R | L | N | P | | L | N | F | S | V | N | Y | G | A | C | Y | R | V | F | N | K |
| ABE5.8 | W | R | L | N | P | | L | N | F | S | V | N | Y | G | A | C | Y | R | V | F | N | K |
| ABE5.9 | W | R | L | N | P | | L | N | F | S | V | N | Y | G | A | C | Y | R | V | F | N | K |
| ABE5.10 | W | R | L | N | P | | L | N | F | S | V | N | Y | G | A | C | Y | R | V | F | N | K |
| ABE5.11 | W | R | L | N | P | | L | N | F | S | V | N | Y | G | A | C | Y | R | V | F | N | K |
| ABE5.12 | W | R | L | N | P | | L | N | F | S | V | N | Y | G | A | C | Y | R | V | F | N | K |
| ABE5.13 | W | R | H | N | P | | L | D | F | S | V | N | Y | A | A | S | Y | R | V | F | K | K |
| ABE5.14 | W | R | H | N | S | | L | N | F | C | V | N | Y | G | A | S | Y | R | V | F | K | K |
| ABE6.1 | W | R | H | N | S | | L | N | F | S | V | N | Y | G | N | S | Y | R | V | F | K | K |
| ABE6.2 | W | R | H | N | T | V | L | N | F | S | V | N | Y | G | N | S | Y | R | V | F | N | K |
| ABE6.3 | W | R | L | N | S | | L | N | F | S | V | N | Y | G | A | C | Y | R | V | F | N | K |
| ABE6.4 | W | R | L | N | S | | L | N | F | S | V | N | Y | G | N | C | Y | R | V | F | N | K |
| ABE6.5 | W | R | L | N | T | V | L | N | F | S | V | N | Y | G | A | C | Y | R | V | F | N | K |
| ABE6.6 | W | R | L | N | T | V | L | N | F | S | V | N | Y | G | N | C | Y | R | V | F | N | K |
| ABE7.1 | W | R | L | N | A | | L | N | F | S | V | N | Y | G | A | C | Y | R | V | F | N | K |
| ABE7.2 | W | R | L | N | A | | L | N | F | S | V | N | Y | G | N | C | Y | R | V | F | N | K |
| ABE7.3 | L | R | L | N | A | | L | N | F | S | V | N | Y | G | A | C | Y | R | V | F | N | K |
| ABE7.4 | R | R | L | N | A | | L | N | F | S | V | N | Y | G | A | C | Y | R | V | F | N | K |
| ABE7.5 | W | R | L | N | A | | L | N | F | S | V | N | Y | G | A | C | Y | H | V | F | N | K |
| ABE7.6 | W | R | L | N | A | | L | N | I | S | V | N | Y | G | A | C | Y | P | V | F | N | K |
| ABE7.7 | L | R | L | N | A | | L | N | F | S | V | N | Y | G | A | C | Y | P | V | F | N | K |
| ABE7.8 | L | R | L | N | A | | L | N | F | S | V | N | Y | G | N | C | Y | R | V | F | N | K |
| ABE7.9 | L | R | L | N | A | | L | N | F | S | V | N | Y | G | N | C | Y | P | V | F | N | K |
| ABE7.10 | R | R | L | N | A | | L | N | F | S | V | N | Y | G | A | C | Y | P | V | F | N | K |

[0593] In some embodiments, the base editor is an eighth generation ABE (ABE8). In some embodiments, the ABE8 contains a TadA*8 variant. In some embodiments, the ABE8 has a monomeric construct containing a TadA*8 variant (“ABE8.x-m”). In some embodiments, the ABE8 is ABE8.1-m, which has a monomeric construct containing TadA*7.10 with a Y147T mutation (TadA*8.1). In some embodiments, the ABE8 is ABE8.2-m, which has a monomeric construct containing TadA*7.10 with a Y147R mutation (TadA*8.2). In some embodiments, the ABE8 is ABE8.3-m, which has a monomeric construct containing TadA*7.10 with a Q154S mutation (TadA*8.3). In some embodiments, the ABE8 is ABE8.4-m, which has a monomeric construct containing TadA*7.10 with a Y123H mutation (TadA*8.4). In some embodiments, the ABE8 is ABE8.5-m, which has a monomeric construct containing TadA*7.10 with a V82S mutation (TadA*8.5). In some embodiments, the ABE8 is ABE8.6-m, which has a monomeric construct containing TadA*7.10 with a T166R mutation (TadA*8.6). In some embodiments, the ABE8 is ABE8.7-m, which has a monomeric construct containing TadA*7.10 with a Q154R mutation (TadA*8.7). In some embodiments, the ABE8 is ABE8.8-m, which has a monomeric construct containing TadA*7.10 with Y147R, Q154R, and Y123H mutations (TadA*8.8). In some embodiments, the ABE8 is ABE8.9-m, which has a monomeric construct containing TadA*7.10 with Y147R, Q154R and I76Y mutations (TadA*8.9). In some embodiments, the ABE8 is ABE8.10-m, which has a monomeric construct containing TadA*7.10 with Y147R, Q154R, and T166R mutations (TadA*8.10). In some embodiments, the ABE8 is ABE8.11-m, which has a monomeric construct containing TadA*7.10 with Y147T and Q154R mutations (TadA*8.11). In some embodiments, the ABE8 is ABE8.12-m, which has a monomeric construct containing TadA*7.10 with Y147T and Q154S mutations (TadA*8.12). In some embodiments, the ABE8 is ABE8.13-m, which has a monomeric construct containing TadA*7.10 with Y123H (Y123H reverted from H123Y), Y147R, Q154R and I76Y mutations (TadA*8.13). In some embodiments, the ABE8 is ABE8.14-m, which has a monomeric construct containing TadA*7.10 with I76Y and V82S mutations (TadA*8.14). In some embodiments, the ABE8 is ABE8.15-m, which has a monomeric construct containing TadA*7.10 with V82S and Y147R mutations (TadA*8.15). In some embodiments, the ABE8 is ABE8.16-m, which has a monomeric construct containing TadA*7.10 with V82S, Y123H (Y123H reverted from H123Y) and Y147R mutations (TadA*8.16). In some embodiments, the ABE8 is ABE8.17-m, which has a monomeric construct containing TadA*7.10 with V82S and Q154R mutations (TadA*8.17). In some embodiments, the ABE8 is ABE8.18-m, which has a monomeric construct containing TadA*7.10 with V82S, Y123H (Y123H reverted from H123Y) and Q154R mutations (TadA*8.18). In some embodiments, the ABE8 is ABE8.19-m, which has a monomeric construct containing TadA*7.10 with V82S, Y123H (Y123H reverted from H123Y), Y147R and Q154R mutations (TadA*8.19). In some embodiments, the ABE8 is ABE8.20-m, which has a monomeric construct containing TadA*7.10 with I76Y, V82S, Y123H (Y123H reverted from H123Y), Y147R and Q154R mutations (TadA*8.20). In some embodiments, the ABE8 is ABE8.21-m, which has a monomeric construct containing TadA*7.10 with Y147R and Q154S mutations (TadA*8.21). In some embodiments, the ABE8 is ABE8.22-m, which has a monomeric construct containing TadA*7.10 with V82S and Q154S mutations (TadA*8.22). In some embodiments, the ABE8 is ABE8.23-m, which has a monomeric construct containing TadA*7.10 with V82S and Y123H (Y123H reverted from H123Y) mutations (TadA*8.23). In some embodiments, the ABE8 is ABE8.24-m, which has a monomeric construct containing TadA*7.10 with V82S, Y123H (Y123H reverted from H123Y), and Y147T mutations (TadA*8.24).

[0594] In some embodiments, the ABE8 has a heterodimeric construct containing wild-type E. coli TadA fused to a TadA*8 variant (“ABE8.x-d”). In some embodiments, the ABE8 is ABE8.1-d, which has a heterodimeric construct containing wild-type E. coli TadA fused to TadA*7.10 with a Y147T mutation (TadA*8.1). In some embodiments, the ABE8 is ABE8.2-d, which has a heterodimeric construct containing wild-type E. coli TadA fused to TadA*7.10 with a Y147R mutation (TadA*8.2). In some embodiments, the ABE8 is ABE8.3-d, which has a heterodimeric construct containing wild-type E. coli TadA fused to TadA*7.10 with a Q154S mutation (TadA*8.3). In some embodiments, the ABE8 is ABE8.4-d, which has a heterodimeric construct containing wild-type E. coli TadA fused to TadA*7.10 with a Y123H mutation (TadA*8.4). In some embodiments, the ABE8 is ABE8.5-d, which has a heterodimeric construct containing wild-type E. coli TadA fused to TadA*7.10 with a V82S mutation (TadA*8.5). In some embodiments, the ABE8 is ABE8.6-d, which has a heterodimeric construct containing wild-type E. coli TadA fused to TadA*7.10 with a T166R mutation (TadA*8.6). In some embodiments, the ABE8 is ABE8.7-d, which has a heterodimeric construct containing wild-type E. coli TadA fused to TadA*7.10 with a Q154R mutation (TadA*8.7). In some embodiments, the ABE8 is ABE8.8-d, which has a heterodimeric construct containing wild-type E. coli TadA fused to TadA*7.10 with Y147R, Q154R, and Y123H mutations (TadA*8.8). In some embodiments, the ABE8 is ABE8.9-d, which has a heterodimeric construct containing wild-type E. coli TadA fused to TadA*7.10 with Y147R, Q154R and I76Y mutations (TadA*8.9). In some embodiments, the ABE8 is ABE8.10-d, which has a heterodimeric construct containing wild-type E. coli TadA fused to TadA*7.10 with Y147R, Q154R, and T166R mutations (TadA*8.10). In some embodiments, the ABE8 is ABE8.11-d, which has a heterodimeric construct containing wild-type E. coli TadA fused to TadA*7.10 with Y147T and Q154R mutations (TadA*8.11). In some embodiments, the ABE8 is ABE8.12-d, which has heterodimeric construct containing wild-type E. coli TadA fused to TadA*7.10 with Y147T and Q154S mutations (TadA*8.12). In some embodiments, the ABE8 is ABE8.13-d, which has a heterodimeric construct containing wild-type E. coli TadA fused to TadA*7.10 with Y123H (Y123H reverted from H123Y), Y147R, Q154R and I76Y mutations (TadA*8.13). In some embodiments, the ABE8 is ABE8.14-d, which has a heterodimeric construct containing wild-type E. coli TadA fused to TadA*7.10 with I76Y and V82S mutations (TadA*8.14). In some embodiments, the ABE8 is ABE8.15-d, which has a heterodimeric construct containing wild-type E. coli TadA fused to TadA*7.10 with V82S and Y147R mutations (TadA*8.15). In some embodiments, the ABE8 is ABE8.16-d, which has a heterodimeric construct containing wild-type E. coli TadA fused to TadA*7.10 with V82S, Y123H (Y123H reverted from H123Y) and Y147R mutations (TadA*8.16). In some embodiments, the ABE8 is ABE8.17-d, which has a heterodimeric construct containing wild-type E. coli TadA fused to TadA*7.10 with V82S and Q154R mutations (TadA*8.17). In some embodiments, the ABE8 is ABE8.18-d, which has a heterodimeric construct containing wild-type E. coli TadA fused to TadA*7.10 with V82S, Y123H (Y123H reverted from H123Y) and Q154R mutations (TadA*8.18). In some embodiments, the ABE8 is ABE8.19-d, which has a heterodimeric construct containing wild-type E. coli TadA fused to TadA*7.10 with V82S, Y123H (Y123H reverted from H123Y), Y147R and Q154R mutations (TadA*8.19). In some embodiments, the ABE8 is ABE8.20-d, which has a heterodimeric construct containing wild-type E. coli TadA fused to TadA*7.10 with I76Y, V82S, Y123H (Y123H reverted from H123Y), Y147R and Q154R mutations (TadA*8.20). In some embodiments, the ABE8 is ABE8.21-d, which has a heterodimeric construct containing wild-type E. coli TadA fused to TadA*7.10 with Y147R and Q154S mutations (TadA*8.21). In some embodiments, the ABE8 is ABE8.22-d, which has a heterodimeric construct containing wild-type E. coli TadA fused to TadA*7.10 with V82S and Q154S mutations (TadA*8.22). In some embodiments, the ABE8 is ABE8.23-d, which has a heterodimeric construct containing wild-type E. coli TadA fused to TadA*7.10 with V82S and Y123H (Y123H reverted from H123Y) mutations (TadA*8.23). In some embodiments, the ABE8 is ABE8.24-d, which has a heterodimeric construct containing wild-type E. coli TadA fused to TadA*7.10 with V82S, Y123H (Y123H reverted from H123Y), and Y147T mutations (TadA*8.24).

[0595] In some embodiments, the ABE8 has a heterodimeric construct containing TadA*7.10 fused to a TadA*8 variant (“ABE8.x-7”). In some embodiments, the ABE8 is ABE8.1-7, which has a heterodimeric construct containing TadA*7.10 fused to TadA*7.10 with a Y147T mutation (TadA*8.1). In some embodiments, the ABE8 is ABE8.2-7, which has a heterodimeric construct containing TadA*7.10 fused to TadA*7.10 with a Y147R mutation (TadA*8.2). In some embodiments, the ABE8 is ABE8.3-7, which has a heterodimeric construct containing TadA*7.10 fused to TadA*7.10 with a Q154S mutation (TadA*8.3). In some embodiments, the ABE8 is ABE8.4-7, which has a heterodimeric construct containing TadA*7.10 fused to TadA*7.10 with a Y123H mutation (TadA*8.4). In some embodiments, the ABE8 is ABE8.5-7, which has a heterodimeric construct containing TadA*7.10 fused to TadA*7.10 with a V82S mutation (TadA*8.5). In some embodiments, the ABE8 is ABE8.6-7, which has a heterodimeric construct containing TadA*7.10 fused to TadA*7.10 with a T166R mutation (TadA*8.6). In some embodiments, the ABE8 is ABE8.7-7, which has a heterodimeric construct containing TadA*7.10 fused to TadA*7.10 with a Q154R mutation (TadA*8.7). In some embodiments, the ABE8 is ABE8.8-7, which has a heterodimeric construct containing TadA*7.10 fused to TadA*7.10 with Y147R, Q154R, and Y123H mutations (TadA*8.8). In some embodiments, the ABE8 is ABE8.9-7, which has a heterodimeric construct containing TadA*7.10 fused to TadA*7.10 with Y147R, Q154R and I76Y mutations (TadA*8.9). In some embodiments, the ABE8 is ABE8.10-7, which has a heterodimeric construct containing TadA*7.10 fused to TadA*7.10 with Y147R, Q154R, and T166R mutations (TadA*8.10). In some embodiments, the ABE8 is ABE8.11-7, which has a heterodimeric construct containing TadA*7.10 fused to TadA*7.10 with Y147T and Q154R mutations (TadA*8.11). In some embodiments, the ABE8 is ABE8.12-7, which has a heterodimeric construct containing TadA*7.10 fused to TadA*7.10 with Y147T and Q154S mutations (TadA*8.12). In some embodiments, the ABE8 is ABE8.13-7, which has a heterodimeric construct containing TadA*7.10 fused to TadA*7.10 with Y123H (Y123H reverted from H123Y), Y147R, Q154R and I76Y mutations (TadA*8.13). In some embodiments, the ABE8 is ABE8.14-7, which has a heterodimeric construct containing TadA*7.10 fused to TadA*7.10 with I76Y and V82S mutations (TadA*8.14). In some embodiments, the ABE8 is ABE8.15-7, which has a heterodimeric construct containing TadA*7.10 fused to TadA*7.10 with V82S and Y147R mutations (TadA*8.15). In some embodiments, the ABE8 is ABE8.16-7, which has a heterodimeric construct containing TadA*7.10 fused to TadA*7.10 with V82S, Y123H (Y123H reverted from H123Y) and Y147R mutations (TadA*8.16). In some embodiments, the ABE8 is ABE8.17-7, which has a heterodimeric construct containing TadA*7.10 fused to TadA*7.10 with V82S and Q154R mutations (TadA*8.17). In some embodiments, the ABE8 is ABE8.18-7, which has a heterodimeric construct containing TadA*7.10 fused to TadA*7.10 with V82S, Y123H (Y123H reverted from H123Y) and Q154R mutations (TadA*8.18). In some embodiments, the ABE8 is ABE8.19-7, which has a heterodimeric construct containing TadA*7.10 fused to TadA*7.10 with V82S, Y123H (Y123H reverted from H123Y), Y147R and Q154R mutations (TadA*8.19). In some embodiments, the ABE8 is ABE8.20-7, which has a heterodimeric construct containing TadA*7.10 fused to TadA*7.10 with I76Y, V82S, Y123H (Y123H reverted from H123Y), Y147R and Q154R mutations (TadA*8.20). In some embodiments, the ABE8 is ABE8.21-7, which has a heterodimeric construct containing TadA*7.10 fused to TadA*7.10 with Y147R and Q154S mutations (TadA*8.21). In some embodiments, the ABE8 is ABE8.22-7, which has a heterodimeric construct containing TadA*7.10 fused to TadA*7.10 with V82S and Q154S mutations (TadA*8.22). In some embodiments, the ABE8 is ABE8.23-7, which has a heterodimeric construct containing TadA*7.10 fused to TadA*7.10 with V82S and Y123H (Y123H reverted from H123Y) mutations (TadA*8.23). In some embodiments, the ABE8 is ABE8.24-7, which has a heterodimeric construct containing TadA*7.10 fused to TadA*7.10 with V82S, Y123H (Y123H reverted from H123Y), and Y147T mutations (TadA*8.24

[0596] In some embodiments, the ABE is ABE8.1-m, ABE8.2-m, ABE8.3-m, ABE8.4-m, ABE8.5-m, ABE8.6-m, ABE8.7-m, ABE8.8-m, ABE8.9-m, ABE8.10-m, ABE8.11-m, ABE8.12-m, ABE8.13-m, ABE8.14-m, ABE8.15-m, ABE8.16-m, ABE8.17-m, ABE8.18-m, ABE8.19-m, ABE8.20-m, ABE8.21-m, ABE8.22-m, ABE8.23-m, ABE8.24-m, ABE8.1-d, ABE8.2-d, ABE8.3-d, ABE8.4-d, ABE8.5-d, ABE8.6-d, ABE8.7-d, ABE8.8-d, ABE8.9-d, ABE8.10-d, ABE8.11-d, ABE8.12-d, ABE8.13-d, ABE8.14-d, ABE8.15-d, ABE8.16-d, ABE8.17-d, ABE8.18-d, ABE8.19-d, ABE8.20-d, ABE8.21-d, ABE8.22-d, ABE8.23-d, or ABE8.24-d as shown in Table 8 below.

TABLE 8
Adenosine Deaminase Base Editor 8 Variants

| | Adenosine | |
|---|---|---|
| ABE8 | Deaminase | Adenosine Deaminase Description |
| ABE8.1-m | TadA* 8.1 | Monomer_TadA* 7.10 + Y147T |
| ABE8.2-m | TadA* 8.2 | Monomer_TadA* 7.10 + Y147R |
| ABE8.3-m | TadA* 8.3 | Monomer_TadA* 7.10 + Q154S |
| ABE8.4-m | TadA* 8.4 | Monomer_TadA* 7.10 + Y123H |
| ABE8.5-m | TadA* 8.5 | Monomer_TadA* 7.10 + V82S |
| ABE8.6-m | TadA* 8.6 | Monomer_TadA* 7.10 + T166R |
| ABE8.7-m | TadA* 8.7 | Monomer_TadA* 7.10 + Q154R |
| ABE8.8-m | TadA* 8.8 | Monomer_TadA* 7.10 + Y147R_Q154R_Y123H |
| ABE8.9-m | TadA* 8.9 | Monomer_TadA* 7.10 + Y147R_Q154R_176Y |
| ABE8.10-m | TadA* 8.10 | Monomer_TadA* 7.10 + Y147R_Q154R_T166R |
| ABE8.11-m | TadA* 8.11 | Monomer_TadA* 7.10 + Y147T_Q154R |
| ABE8.12-m | TadA* 8.12 | Monomer_TadA*7.10 + Y147T_Q154S |
| ABE8.13-m | TadA* 8.13 | Monomer_TadA* 7.10 + Y123H_Y147R_Q154R_176Y |
| ABE8.14-m | TadA* 8.14 | Monomer_TadA* 7.10 + I76Y_V82S |
| ABE8.15-m | TadA* 8.15 | Monomer_TadA*7.10 + V82S_Y147R |
| ABE8.16-m | TadA* 8.16 | Monomer TadA* 7.10 + V82S Y123H Y147R |
| ABE8.17-m | TadA* 8.17 | Monomer_TadA* 7.10 + V82S_Q154R |
| ABE8.18-m | TadA* 8.18 | Monomer_TadA* 7.10 + V82S Y123H_Q154R |
| ABE8.19-m | TadA* 8.19 | Monomer_TadA* 7.10 + V82S_Y123H_Y147R_Q154R |
| ABE8.20-m | TadA* 8.20 | Monomer_TadA* 7.10 + I76Y_V82S_Y123H_Y147R_Q154R |
| ABE8.21-m | TadA* 8.21 | Monomer_TadA* 7.10 + Y147R_Q 154S |
| ABE8.22-m | TadA* 8.22 | Monomer_TadA* 7.10 + V82S_Q154S |
| ABE8.23-m | TadA* 8.23 | Monomer TadA* 7.10 + V82S Y123H |
| ABE8.24-m | TadA* 8.24 | Monomer_TadA* 7.10 + V82S_Y123H_Y147T |
| ABE8.1-d | TadA*8.1 | Heterodimer_(WT) + (TadA* 7.10 + Y147T) |
| ABE8.2-d | TadA* 8.2 | Heterodimer_(WT) + (TadA* 7.10 + Y147R) |
| ABE8.3-d | TadA* 8.3 | Heterodimer_(WT) + (TadA* 7.10 + Q154 S) |
| ABE8.4-d | TadA* 8.4 | Heterodimer (WT) + (TadA*7.10 + Y123H) |
| ABE8.5-d | TadA* 8.5 | Heterodimer_(WT) + (TadA* 7.10 + V82S) |
| ABE8.6-d | TadA* 8.6 | Heterodimer_(WT) + (TadA* 7.10 + T166R) |
| ABE8.7-d | TadA* 8.7 | Heterodimer_(WT) + (TadA* 7.10 + Q154R) |
| ABE8.8-d | TadA* 8.8 | Heterodimer_(WT) + (TadA* 7.10 + Y147R_Q154R_Y123H) |
| ABE8.9-d | TadA* 8.9 | Heterodimer (WT) + (TadA* 7.10 + Y147R_Q154R_176Y) |
| ABE8.10-d | TadA* 8.10 | Heterodimer_(WT) + (TadA*7.10 + Y147R_Q154R_T166R) |
| ABE8.11-d | TadA* 8.11 | Heterodimer_(WT) + (TadA* 7.10 + Y147T_Q154R) |
| ABE8.12-d | TadA* 8.12 | Heterodimer_(WT) + (TadA*7.10 + Y147T_Q154S) |
| ABE8.13-d | TadA* 8.13 | Heterodimer_(WT) + (TadA*7.10 + Y123H_Y147T_Q154R_176Y) |
| ABE8.14-d | TadA*8.14 | Heterodimer_(WT) + (TadA* 7.10 + I76Y_V82S) |
| ABE8.15-d | TadA* 8.15 | Heterodimer_(WT) + (TadA* 7.10 + V82S_ Y147R) |
| ABE8.16-d | TadA* 8.16 | Heterodimer_(WT) + (TadA* 7.10 + V82S_Y123H_Y147R) |
| ABE8.17-d | TadA* 8.17 | Heterodimer_(WT) + (TadA* 7.10 + V82S_Q154R) |
| ABE8.18-d | TadA* 8.18 | Heterodimer_(WT) + (TadA* 7.10 + V82S_Y123H_Q154R) |
| ABE8.19-d | TadA* 8.19 | Heterodimer_(WT) + (TadA* 7.10 + V82S_Y123H_Y147R_Q154R) |
| ABE8.20-d | TadA* 8.20 | Heterodimer (WT) + (TadA* 7.10 + |
| | | I76Y V82S Y123H Y147R Q154R) |
| ABE8.21-d | TadA* 8.21 | Heterodimer_(WT) + (TadA* 7.10 + Y147R_Q154S) |
| ABE8.22-d | TadA* 8.22 | Heterodimer_(WT) + (TadA* 7.10 + V82S_Q154S) |
| ABE8.23-d | TadA* 8.23 | Heterodimer_(WT) + (TadA*7.10 + V82S_Y123H) |
| ABE8.24-d | TadA* 8.24 | Heterodimer (WT) + (TadA* 7.10 + V82S_Y123H_Y147T) |

In some embodiments, base editors (e.g., ABE8) are generated by cloning an adenosine deaminase variant (e.g., TadA*8) into a scaffold that includes a circular permutant Cas9 (e.g., CP5 or CP6) and a bipartite nuclear localization sequence. In some embodiments, the base editor (e.g., ABE7.9, ABE7.10, or ABE8) is an NGC PAM CP5 variant (S. pyrogenes Cas9 or spVRQR Cas9). In some embodiments, the base editor (e.g., ABE7.9, ABE7.10, or ABE8) is an AGA PAM CP5 variant (S. pyrogenes Cas9 or spVRQR Cas9). In some embodiments, the base editor (e.g., ABE7.9, ABE7.10, or ABE8) is an NGC PAM CP6 variant (S. pyrogenes Cas9 or spVRQR Cas9). In some embodiments, the base editor (e.g. ABE7.9, ABE7.10, or ABE8) is an AGA PAM CP6 variant (S. pyrogenes Cas9 or spVRQR Cas9).

[0597] In some embodiments, the ABE has a genotype as shown in Table 9 below.

TABLE 9
Genotypes of ABEs

| | 23 | 26 | 36 | 37 | 48 | 49 | 51 | 72 | 84 | 87 | 105 | 108 | 123 | 125 | 142 | 145 | 147 | 152 | 155 | 156 | 157 | 161 |
|---|---|---|---|---|---|---|---|---|---|---|---|---|---|---|---|---|---|---|---|---|---|---|
| ABE7.9 | L | R | L | N | A | | L | N | F | S | V | N | Y | G | N | C | Y | P | V | F | N | K |
| ABE7.10 | R | R | L | N | A | | L | N | F | S | V | N | Y | G | A | C | Y | P | V | F | N | K |

[0598] As shown in Table 10 below, genotypes of 40 ABE8s are described. Residue positions in the evolved E. coli TadA portion of ABE are indicated. Mutational changes in ABE8 are shown when distinct from ABE7.10 mutations. In some embodiments, the ABE has a genotype of one of the ABEs as shown in Table 10 below.

TABLE 10
Residue Identity in Evolved TadA

| | 23 | 36 | 48 | 51 | 76 | 82 | 84 | 106 | 108 | 123 | 146 | 147 | 152 | 154 | 155 | 156 | 157 | 166 |
|---|---|---|---|---|---|---|---|---|---|---|---|---|---|---|---|---|---|---|
| ABE7.10 | R | L | A | L | I | V | F | V | N | Y | C | Y | P | Q | V | F | N | T |
| ABE8.1-m | | | | | | | | | | | | T | | | | | | |
| ABE8.2-m | | | | | | | | | | | | R | | | | | | |
| ABE8.3-m | | | | | | | | | | | | S | | | | | | |
| ABE8.4-m | | | | | | | | H | | | | | | | | | | |
| ABE8.5-m | | | | S | | | | | | | | | | | | | | |
| ABE8.6-m | | | | | | | | | | | | | | | | | | R |
| ABE8.7-m | | | | | | | | | | | | R | | | | | | |
| ABE8.8-m | | | | | | | | H | | R | | R | | | | | | |
| ABE8.9-m | | | Y | | | | | | | R | | R | | | | | | |
| ABE8.10-m | | | | | | | | | | R | | R | | | | | | R |
| ABE8.11-m | | | | | | | | | | T | | R | | | | | | |
| ABE8.12-m | | | | | | | | | | T | | S | | | | | | |
| ABE8.13-m | | | Y | | | | | H | | R | | R | | | | | | |
| ABE8.14-m | | | Y | S | | | | | | | | | | | | | | |
| ABE8.15-m | | | | S | | | | | | R | | | | | | | | |
| ABE8.16-m | | | | S | | | | H | | R | | | | | | | | |
| ABE8.17-m | | | | S | | | | | | | | R | | | | | | |
| ABE8.18-m | | | | S | | | | H | | | | R | | | | | | |
| ABE8.19-m | | | | S | | | | H | | R | | R | | | | | | |
| ABE8.20-m | | | Y | S | | | | H | | R | | R | | | | | | |
| ABE8.21-m | | | | | | | | | | R | | S | | | | | | |
| ABE8.22-m | | | | S | | | | | | | | S | | | | | | |
| ABE8.23-m | | | | S | | | | H | | | | | | | | | | |
| ABE8.24-m | | | | S | | | | H | | T | | | | | | | | |
| ABE8.1-d | | | | | | | | | | T | | | | | | | | |
| ABE8.2-d | | | | | | | | | | R | | | | | | | | |
| ABE8.3-d | | | | | | | | | | | | S | | | | | | |
| ABE8.4-d | | | | | | | | H | | | | | | | | | | |
| ABE8.5-d | | | | S | | | | | | | | | | | | | | |
| ABE8.6-d | | | | | | | | | | | | | | | | | | R |
| ABE8.7-d | | | | | | | | | | | | R | | | | | | |
| ABE8.8-d | | | | | | | | H | | R | | R | | | | | | |
| ABE8.9-d | | | Y | | | | | | | R | | R | | | | | | |
| ABE8.10-d | | | | | | | | | | R | | R | | | | | | R |
| ABE8.11-d | | | | | | | | | | T | | R | | | | | | |
| ABE8.12-d | | | | | | | | | | T | | S | | | | | | |
| ABE8.13-d | | | Y | | | | | H | | R | | R | | | | | | |
| ABE8.14-d | | | Y | S | | | | | | | | | | | | | | |
| ABE8.15-d | | | | S | | | | | | R | | | | | | | | |
| ABE8.16-d | | | | S | | | | H | | R | | | | | | | | |
| ABE8.17-d | | | | S | | | | | | | | R | | | | | | |
| ABE8.18-d | | | | S | | | | H | | | | R | | | | | | |
| ABE8.19-d | | | | S | | | | H | | R | | R | | | | | | |
| ABE8.20-d | | | Y | S | | | | H | | R | | R | | | | | | |
| ABE8.21-d | | | | | | | | | | R | | S | | | | | | |
| ABE8.22-d | | | | S | | | | | | | | S | | | | | | |
| ABE8.23-d | | | | S | | | | H | | | | | | | | | | |
| ABE8.24-d | | | | S | | | | H | | T | | | | | | | | |

[0599] In some embodiments, the base editor is ABE8.1, which comprises or consists essentially of the following sequence or a fragment thereof having adenosine deaminase activity:

ABE8.1_Y147T_CP5_NGC PAM_monomer
MSEVEFSHEYWMRHALTLAKRARDEREVPVGAVLVLNNRVIGEGWNRAIGLHDPTAHAEIMA
LRQGGLVMQNYRLIDATLYVTFEPCVMCAGAMIHSRIGRVVFGVRNAKTGAAGSLMDVLHYP
GMNHRVEITEGILADECAALLCTFFRMPRQVFNAQKKAQSSTD [symbol] [symbol]
EIGKATAKYFFYSNIMNFFKTEITLANGEIRKRPLIETNGETGEIVWDK
GRDFATVRKVLSMPQVNIVKKTEVQTGGFSKESILPKRNSDKLIARKKDWDPKKYGGFMQPT
VAYSVLVVAKVEKGKSKKLKSVKELLGITIMERSSFEKNPIDFLEAKGYKEVKKDLIIKLPK
YSLFELENGRKRMLASAKFLQKGNELALPSKYVNFLYLASHYEKLKGSPEDNEQKQLFVEQH
KHYLDEIIEQISEFSKRVILADANLDKVLSAYNKHRDKPIREQAENIIHLFTLTNLGAPRAF
KYFDTTIARKEYRSTKEVLDATLIHQSITGLYETRIDLSQLGGD [symbol] [symbol]
DKKYSIGLAIGTNSVGWAVITDEYKVPSKKFKVLGNTDRHSIKKNLIGALLFDSGETAE
ATRLKRTARRRYTRRKNRICYLQEIFSNEMAKVDDSFFHRLEESFLVEEDKKHERHPIFGNI
VDEVAYHEKYPTIYHLRKKLVDSTDKADLRLIYLALAHMIKFRGHFLIEGDLNPDNSDVDKL
FIQLVQTYNQLFEENPINASGVDAKAILSARLSKSRRLENLIAQLPGEKKNGLFGNLIALSL
GLTPNFKSNFDLAEDAKLQLSKDTYDDDLDNLLAQIGDQYADLFLAAKNLSDAILLSDILRV
NTEITKAPLSASMIKRYDEHHQDLTLLKALVRQQLPEKYKEIFFDQSKNGYAGYIDGGASQE
EFYKFIKPILEKMDGTEELLVKLNREDLLRKQRTFDNGSIPHQIHLGELHAILRRQEDFYPF
LKDNREKIEKILTFRIPYYVGPLARGNSRFAWMTRKSEETITPWNFEEVVDKGASAQSFIER
MTNFDKNLPNEKVLPKHSLLYEYFTVYNELTKVKYVTEGMRKPAFLSGEQKKAIVDLLFKTN
RKVTVKQLKEDYFKKIECFDSVEISGVEDRFNASLGTYHDLLKIIKDKDFLDNEENEDILED
IVLTLTLFEDREMIEERLKTYAHLFDDKVMKQLKRRRYTGWGRLSRKLINGIRDKQSGKTIL
DFLKSDGFANRNFMQLIHDDSLTFKEDIQKAQVSGQGDSLHEHIANLAGSPAIKKGILQTVK
VVDELVKVMGRHKPENIVIEMARENQTTQKGQKNSRERMKRIEEGIKELGSQILKEHPVENT
QLQNEKLYLYYLQNGRDMYVDQELDINRLSDYDVDHIVPQSFLKDDSIDNKVLTRSDKNRGK
SDNVPSEEVVKKMKNYWRQLLNAKLITQRKFDNLTKAERGGLSELDKAGFIKRQLVETRQIT
KHVAQILDSRMNTKYDENDKLIREVKVITLKSKLVSDFRKDFQFYKVREINNYHHAHDAYLN
AVVGTALIKKYPKLESEFVYGDYKVYDVRKMIAKSEQEGADKRTADGSEFESPKKKRKV*

In the above sequence, the plain text denotes an adenosine deaminase sequence, bold sequence indicates sequence derived from Cas9, the italics sequence denotes a linker sequence, and the underlined sequence denotes a bipartite nuclear localization sequence.

[0600] In some embodiments, the base editor is ABE8.1, which comprises or consists essentially of the following sequence or a fragment thereof having adenosine deaminase activity:

pNMG-B335 ABE8.1_Y147T_CP5_NGC PAM_monomer:
MSEVEFSHEYWMRHALTLAKRARDEREVPVGAVLVLNNRVIGEGWNRAIGLHDPTAHAEIMA
LRQGGLVMQNYRLIDATLYVTFEPCVMCAGAMIHSRIGRVVFGVRNAKTGAAGSLMDVLHYP
GMNHRVEITEGILADECAALLCTFFRMPRQVFNAQKKAQSSTDSGGSSGGSSGSETPGTSES
ATPESSGGSSGGSEIGKATAKYFFYSNIMNFFKTEITLANGEIRKRPLIETNGETGEIVWDK
GRDFATVRKVLSMPQVNIVKKTEVQTGGFSKESILPKRNSDKLIARKKDWDPKKYGGFMQPT
VAYSVLVVAKVEKGKSKKLKSVKELLGITIMERSSFEKNPIDFLEAKGYKEVKKDLIIKLPK
YSLFELENGRKRMLASAKFLQKGNELALPSKYVNFLYLASHYEKLKGSPEDNEQKQLFVEQH
KHYLDEIIEQISEFSKRVILADANLDKVLSAYNKHRDKPIREQAENIIHLFTLTNLGAPRAF
KYFDTTIARKEYRSTKEVLDATLIHQSITGLYETRIDLSQLGGDGGSGGSGGSGGSGGSGGS
GGMDKKYSIGLAIGTNSVGWAVITDEYKVPSKKFKVLGNTDRHSIKKNLIGALLFDSGETAE
ATRLKRTARRRYTRRKNRICYLQEIFSNEMAKVDDSFFHRLEESFLVEEDKKHERHPIFGNI
VDEVAYHEKYPTIYHLRKKLVDSTDKADLRLIYLALAHMIKFRGHFLIEGDLNPDNSDVDKL
FIQLVQTYNQLFEENPINASGVDAKAILSARLSKSRRLENLIAQLPGEKKNGLFGNLIALSL
GLTPNFKSNFDLAEDAKLQLSKDTYDDDLDNLLAQIGDQYADLFLAAKNLSDAILLSDILRV
NTEITKAPLSASMIKRYDEHHQDLTLLKALVRQQLPEKYKEIFFDQSKNGYAGYIDGGASQE
EFYKFIKPILEKMDGTEELLVKLNREDLLRKQRTFDNGSIPHQIHLGELHAILRRQEDFYPF
LKDNREKIEKILTFRIPYYVGPLARGNSRFAWMTRKSEETITPWNFEEVVDKGASAQSFIER
MTNFDKNLPNEKVLPKHSLLYEYFTVYNELTKVKYVTEGMRKPAFLSGEQKKAIVDLLFKTN
RKVTVKQLKEDYFKKIECFDSVEISGVEDRFNASLGTYHDLLKIIKDKDFLDNEENEDILED
IVLTLTLFEDREMIEERLKTYAHLFDDKVMKQLKRRRYTGWGRLSRKLINGIRDKQSGKTIL
DFLKSDGFANRNFMQLIHDDSLTFKEDIQKAQVSGQGDSLHEHIANLAGSPAIKKGILQTVK
VVDELVKVMGRHKPENIVIEMARENQTTQKGQKNSRERMKRIEEGIKELGSQILKEHPVENT
QLQNEKLYLYYLQNGRDMYVDQELDINRLSDYDVDHIVPQSFLKDDSIDNKVLTRSDKNRGK
SDNVPSEEVVKKMKNYWRQLLNAKLITQRKFDNLTKAERGGLSELDKAGFIKRQLVETRQIT
KHVAQILDSRMNTKYDENDKLIREVKVITLKSKLVSDFRKDFQFYKVREINNYHHAHDAYLN
AVVGTALIKKYPKLESEFVYGDYKVYDVRKMIAKSEQEGADKRTADGSEFESPKKKRKV*

In the above sequence, the plain text denotes an adenosine deaminase sequence, bold sequence indicates sequence derived from Cas9, the italics sequence denotes a linker sequence, and the underlined sequence denotes a bipartite nuclear localization sequence.

[0601] In some embodiments, the base editor is ABE8.14, which comprises or consists essentially of the following sequence or a fragment thereof having adenosine deaminase activity:

pNMG-357_ABE8.14_with_NGC PAM CP5
MSEVEFSHEYWMRHALTLAKRAWDEREVPVGAVLVHNNRVIGEGWNRPIGRHDPTAHAEIMA
LRQGGLVMQNYRLIDATLYVTLEPCVMCAGAMIHSRIGRVVFGARDAKTGAAGSLMDVLHHP
GMNHRVEITEGILADECAALLSDFFRMRRQEIKAQKKAQSSTDGGSSGGSSGSETPGTSESA
TPESSGGSSGGSMSEVEFSHEYWMRHALTLAKRARDEREVPVGAVLVLNNRVIGEGWNRAIG
LHDPTAHAEIMALRQGGLVMQNYRLIDATLYVTFEPCVMCAGAMIHSRIGRVVFGVRNAKTG
AAGSLMDVLHYPGMNHRVEITEGILADECAALLCTFFRMPRQVFNAQKKAQSSTDSGGSSGG
SSGSETPGTSESATPESSGGSSGGSEIGKATAKYFFYSNIMNFFKTEITLANGEIRKRPLIE
TNGETGEIVWDKGRDFATVRKVLSMPQVNIVKKTEVQTGGFSKESILPKRNSDKLIARKKDW
DPKKYGGFMQPTVAYSVLVVAKVEKGKSKKLKSVKELLGITIMERSSFEKNPIDFLEAKGYK
EVKKDLIIKLPKYSLFELENGRKRMLASAKFLQKGNELALPSKYVNFLYLASHYEKLKGSPE
DNEQKQLFVEQHKHYLDEIIEQISEFSKRVILADANLDKVLSAYNKHRDKPIREQAENIIHL
FTLTNLGAPRAFKYFDTTIARKEYRSTKEVLDATLIHQSITGLYETRIDLSQLGGDGGSGGS
GGSGGSGGSGGSGGMDKKYSIGLAIGTNSVGWAVITDEYKVPSKKFKVLGNTDRHSIKKNLI
GALLFDSGETAEATRLKRTARRRYTRRKNRICYLQEIFSNEMAKVDDSFFHRLEESFLVEED
KKHERHPIFGNIVDEVAYHEKYPTIYHLRKKLVDSTDKADLRLIYLALAHMIKFRGHFLIEG
DLNPDNSDVDKLFIQLVQTYNQLFEENPINASGVDAKAILSARLSKSRRLENLIAQLPGEKK
NGLFGNLIALSLGLTPNFKSNFDLAEDAKLQLSKDTYDDDLDNLLAQIGDQYADLFLAAKNL
SDAILLSDILRVNTEITKAPLSASMIKRYDEHHQDLTLLKALVRQQLPEKYKEIFFDQSKNG
YAGYIDGGASQEEFYKFIKPILEKMDGTEELLVKLNREDLLRKQRTFDNGSIPHQIHLGELH
AILRRQEDFYPFLKDNREKIEKILTFRIPYYVGPLARGNSRFAWMTRKSEETITPWNFEEVV
DKGASAQSFIERMTNFDKNLPNEKVLPKHSLLYEYFTVYNELTKVKYVTEGMRKPAFLSGEQ
KKAIVDLLFKTNRKVTVKQLKEDYFKKIECFDSVEISGVEDRFNASLGTYHDLLKIIKDKDF
LDNEENEDILEDIVLTLTLFEDREMIEERLKTYAHLFDDKVMKQLKRRRYTGWGRLSRKLIN
GIRDKQSGKTILDFLKSDGFANRNFMQLIHDDSLTFKEDIQKAQVSGQGDSLHEHIANLAGS
PAIKKGILQTVKVVDELVKVMGRHKPENIVIEMARENQTTQKGQKNSRERMKRIEEGIKELG
SQILKEHPVENTQLQNEKLYLYYLQNGRDMYVDQELDINRLSDYDVDHIVPQSFLKDDSIDN
KVLTRSDKNRGKSDNVPSEEVVKKMKNYWRQLLNAKLITQRKFDNLTKAERGGLSELDKAGF
IKRQLVETRQITKHVAQILDSRMNTKYDENDKLIREVKVITLKSKLVSDFRKDFQFYKVREI
NNYHHAHDAYLNAVVGTALIKKYPKLESEFVYGDYKVYDVRKMIAKSEQEGADKRTADGSEF
ESPKKKRKV*

[0602] In the above sequence, the plain text denotes an adenosine deaminase sequence, bold sequence indicates sequence derived from Cas9, the italics sequence denotes a linker sequence, and the underlined sequence denotes a bipartite nuclear localization sequence.

[0603] In some embodiments, the base editor is ABE8.8-m, which comprises or consists essentially of the following sequence or a fragment thereof having adenosine deaminase activity.

ABE8.8-m
MSEVEFSHEYWMRHALTLAKRARDEREVPVGAVLVLNNRVIGEGWNRAIGLHDPTAHAEIMA
LRQGGLVMQNYRLIDATLYVTFEPCVMCAGAMIHSRIGRVVFGVRNAKTGAAGSLMDVLHHP
GMNHRVEITEGILADECAALLCRFFRMPRRVFNAQKKAQSSTDSGGSSGGSSGSETPGTSES
ATPESSGGSSGGSDKKYSIGL [symbol] IGTNSVGWAVITDEYKVPSKKFKVLGNTDRHSIKKNLIGA
LLFDSGETAEATRLKRTARRRYTRRKNRICYLQEIFSNEMAKVDDSFFHRLEESFLVEEDKK
HERHPIFGNIVDEVAYHEKYPTIYHLRKKLVDSTDKADLRLIYLALAHMIKFRGHFLIEGDL
NPDNSDVDKLFIQLVQTYNQLFEENPINASGVDAKAILSARLSKSRRLENLIAQLPGEKKNG
LFGNLIALSLGLTPNFKSNFDLAEDAKLQLSKDTYDDDLDNLLAQIGDQYADLFLAAKNLSD
AlLLSDILRVNTEITKAPLSASMIKRYDEHHQDLTLLKALVRQQLPEKYKEIFFDQSKNGYA
GYIDGGASQEEFYKFIKPILEKMDGTEELLVKLNREDLLRKQRTFDNGSIPHQIHLGELHAI
LRRQEDFYPFLKDNREKIEKILTFRIPYYVGPLARGNSRFAWMTRKSEETITPWNFEEVVDK
GASAQSFIERMTNFDKNLPNEKVLPKHSLLYEYFTVYNELTKVKYVTEGMRKPAFLSGEQKK
AIVDLLFKTNRKVTVKQLKEDYFKKIECFDSVEISGVEDRFNASLGTYHDLLKIIKDKDFLD
NEENEDILEDIVLTLTLFEDREMIEERLKTYAHLFDDKVMKQLKRRRYTGWGRLSRKLINGI
RDKQSGKTILDFLKSDGFANRNFMQLIHDDSLTFKEDIQKAQVSGQGDSLHEHIANLAGSPA
IKKGILQTVKVVDELVKVMGRHKPENIVIEMARENQTTQKGQKNSRERMKRIEEGIKELGSQ
ILKEHPVENTQLQNEKLYLYYLQNGRDMYVDQELDINRLSDYDVDHIVPQSFLKDDSIDNKV
LTRSDKNRGKSDNVPSEEVVKKMKNYWRQLLNAKLITQRKFDNLTKAERGGLSELDKAGFIK
RQLVETRQITKHVAQILDSRMNTKYDENDKLIREVKVITLKSKLVSDFRKDFQFYKVREINN
YHHAHDAYLNAVVGTALIKKYPKLESEFVYGDYKVYDVRKMIAKSEQEIGKATAKYFFYSNI
MNFFKTEITLANGEIRKRPLIETNGETGEIVWDKGRDFATVRKVLSMPQVNIVKKTEVQTGG
FSKESILPKRNSDKLIARKKDWDPKKYGGFDSPTVAYSVLVVAKVEKGKSKKLKSVKELLGI
TIMERSSFEKNPIDFLEAKGYKEVKKDLIIKLPKYSLFELENGRKRMLASAGELQKGNELAL
PSKYVNFLYLASHYEKLKGSPEDNEQKQLFVEQHKHYLDEIIEQISEFSKRVILADANLDKV
LSAYNKHRDKPIREQAENIIHLFTLTNLGAPAAFKYFDTTIDRKRYTSTKEVLDATLIHQSI
TGLYETRIDLSQLGGDEGADKRTADGSEFESPKKKRKV*

[0604] In the above sequence, the plain text denotes an adenosine deaminase sequence, bold sequence indicates sequence derived from Cas9, the italicized sequence denotes a linker sequence, underlined sequence denotes a bipartite nuclear localization sequence, and double underlined sequence indicates mutations.

[0605] In some embodiments, the base editor is ABE8.8-d, which comprises or consists essentially of the following sequence or a fragment thereof having adenosine deaminase activity:

ABE8.8-d
mSEVEFSHEYWMRHALTLAKRAWDEREVPVGAVLVHNNRVIGEGWNRPIGRHDPTAHAEIMA
LRQGGLVMQNYRLIDATLYVTLEPCVMCAGAMIHSRIGRVVFGARDAKTGAAGSLMDVLHHP
GMNHRVEITEGILADECAALLSDFFRMRRQEIKAQKKAQSSTDSGGSSGGSSGSETPGTSES
ATPESSGGSSGGSSEVEFSHEYWMRHALTLAKRARDEREVPVGAVLVLNNRVIGEGWNRAIG
LHDPTAHAEIMALRQGGLVMQNYRLIDATLYVTFEPCVMCAGAMIHSRIGRVVFGVRNAKTG
AAGSLMDVLHHPGMNHRVEITEGILADECAALLCRFFRMPRRVFNAQKKAQSSTDSGGSSGG
SSGSETPGTSESATPESSGGSSGGSDKKYSIGL [symbol] IGTNSVGWAVITDEYKVPSKKFKVLGNT
DRHSIKKNLIGALLFDSGETAEATRLKRTARRRYTRRKNRICYLQEIFSNEMAKVDDSFFHR
LEESFLVEEDKKHERHPIFGNIVDEVAYHEKYPTIYHLRKKLVDSTDKADLRLIYLALAHMI
KFRGHFLIEGDLNPDNSDVDKLFIQLVQTYNQLFEENPINASGVDAKAILSARLSKSRRLEN
LIAQLPGEKKNGLFGNLIALSLGLTPNFKSNFDLAEDAKLQLSKDTYDDDLDNLLAQIGDQY
ADLFLAAKNLSDAILLSDILRVNTEITKAPLSASMIKRYDEHHQDLTLLKALVRQQLPEKYK
EIFFDQSKNGYAGYIDGGASQEEFYKFIKPILEKMDGTEELLVKLNREDLLRKQRTFDNGSI
PHQIHLGELHAILRRQEDFYPFLKDNREKIEKILTFRIPYYVGPLARGNSRFAWMTRKSEET
ITPWNFEEVVDKGASAQSFIERMTNFDKNLPNEKVLPKHSLLYEYFTVYNELTKVKYVTEGM
RKPAFLSGEQKKAIVDLLFKTNRKVTVKQLKEDYFKKIECFDSVEISGVEDRFNASLGTYHD
LLKIIKDKDFLDNEENEDILEDIVLTLTLFEDREMIEERLKTYAHLFDDKVMKQLKRRRYTG
WGRLSRKLINGIRDKQSGKTILDFLKSDGFANRNFMQLIHDDSLTFKEDIQKAQVSGQGDSL
HEHIANLAGSPAIKKGILQTVKVVDELVKVMGRHKPENIVIEMARENQTTQKGQKNSRERMK
RIEEGIKELGSQILKEHPVENTQLQNEKLYLYYLQNGRDMYVDQELDINRLSDYDVDHIVPQ
SFLKDDSIDNKVLTRSDKNRGKSDNVPSEEVVKKMKNYWRQLLNAKLITQRKFDNLTKAERG
GLSELDKAGFIKRQLVETRQITKHVAQILDSRMNTKYDENDKLIREVKVITLKSKLVSDFRK
DFQFYKVREINNYHHAHDAYLNAVVGTALIKKYPKLESEFVYGDYKVYDVRKMIAKSEQEIG
KATAKYFFYSNIMNFFKTEITLANGEIRKRPLIETNGETGEIVWDKGRDFATVRKVLSMPQV
NIVKKTEVQTGGFSKESILPKRNSDKLIARKKDWDPKKYGGFDSPTVAYSVLVVAKVEKGKS
KKLKSVKELLGITIMERSSFEKNPIDFLEAKGYKEVKKDLIIKLPKYSLFELENGRKRMLAS
AGELQKGNELALPSKYVNFLYLASHYEKLKGSPEDNEQKQLFVEQHKHYLDEIIEQISEFSK
RVILADANLDKVLSAYNKHRDKPIREQAENIIHLFTLTNLGAPAAFKYFDTTIDRKRYTSTK
EVLDATLIHQSITGLYETRIDLSQLGGDEGADKRTADGSEFESPKKKRKV*

[0606] In the above sequence, the plain text denotes an adenosine deaminase sequence, bold sequence indicates sequence derived from Cas9, the italicized sequence denotes a linker sequence, underlined sequence denotes a bipartite nuclear localization sequence, and double underlined sequence indicates mutations.

[0607] In some embodiments, the base editor is ABE8.13-m, which comprises or consists essentially of the following sequence or a fragment thereof having adenosine deaminase activity:

ABE8.13-m
MSEVEFSHEYWMRHALTLAKRARDEREVPVGAVLVLNNRVIGEGWNRAIGLHDPTAHAEIMA
LRQGGLVMQNYRLYDATLYVTFEPCVMCAGAMIHSRIGRVVFGVRNAKTGAAGSLMDVLHHP
GMNHRVEITEGILADECAALLCRFFRMPRRVFNAQKKAQSSTDSGGSSGGSSGSETPGTSES
ATPESSGGSSGGSDKKYSIGL [symbol] IGTNSVGWAVITDEYKVPSKKFKVLGNTDRHSIKKNLIGA
LLFDSGETAEATRLKRTARRRYTRRKNRICYLQEIFSNEMAKVDDSFFHRLEESFLVEEDKK
HERHPIFGNIVDEVAYHEKYPTIYHLRKKLVDSTDKADLRLIYLALAHMIKFRGHFLIEGDL
NPDNSDVDKLFIQLVQTYNQLFEENPINASGVDAKAILSARLSKSRRLENLIAQLPGEKKNG
LFGNLIALSLGLTPNFKSNFDLAEDAKLQLSKDTYDDDLDNLLAQIGDQYADLFLAAKNLSD
AlLLSDILRVNTEITKAPLSASMIKRYDEHHQDLTLLKALVRQQLPEKYKEIFFDQSKNGYA
GYIDGGASQEEFYKFIKPILEKMDGTEELLVKLNREDLLRKQRTFDNGSIPHQIHLGELHAI
LRRQEDFYPFLKDNREKIEKILTFRIPYYVGPLARGNSRFAWMTRKSEETITPWNFEEVVDK
GASAQSFIERMTNFDKNLPNEKVLPKHSLLYEYFTVYNELTKVKYVTEGMRKPAFLSGEQKK
AIVDLLFKTNRKVTVKQLKEDYFKKIECFDSVEISGVEDRFNASLGTYHDLLKIIKDKDFLD
NEENEDILEDIVLTLTLFEDREMIEERLKTYAHLFDDKVMKQLKRRRYTGWGRLSRKLINGI
RDKQSGKTILDFLKSDGFANRNFMQLIHDDSLTFKEDIQKAQVSGQGDSLHEHIANLAGSPA
IKKGILQTVKVVDELVKVMGRHKPENIVIEMARENQTTQKGQKNSRERMKRIEEGIKELGSQ
ILKEHPVENTQLQNEKLYLYYLQNGRDMYVDQELDINRLSDYDVDHIVPQSFLKDDSIDNKV
LTRSDKNRGKSDNVPSEEVVKKMKNYWRQLLNAKLITQRKFDNLTKAERGGLSELDKAGFIK
RQLVETRQITKHVAQILDSRMNTKYDENDKLIREVKVITLKSKLVSDFRKDFQFYKVREINN
YHHAHDAYLNAVVGTALIKKYPKLESEFVYGDYKVYDVRKMIAKSEQEIGKATAKYFFYSNI
MNFFKTEITLANGEIRKRPLIETNGETGEIVWDKGRDFATVRKVLSMPQVNIVKKTEVQTGG
FSKESILPKRNSDKLIARKKDWDPKKYGGFDSPTVAYSVLVVAKVEKGKSKKLKSVKELLGI
TIMERSSFEKNPIDFLEAKGYKEVKKDLIIKLPKYSLFELENGRKRMLASAGELQKGNELAL
PSKYVNFLYLASHYEKLKGSPEDNEQKQLFVEQHKHYLDEIIEQISEFSKRVILADANLDKV
LSAYNKHRDKPIREQAENIIHLFTLTNLGAPAAFKYFDTTIDRKRYTSTKEVLDATLIHQSI
TGLYETRIDLSQLGGDEGADKRTADGSEFESPKKKRKV*

[0608] In the above sequence, the plain text denotes an adenosine deaminase sequence, bold sequence indicates sequence derived from Cas9, the italicized sequence denotes a linker sequence, underlined sequence denotes a bipartite nuclear localization sequence, and double underlined sequence indicates mutations.

[0609] In some embodiments, the base editor is ABE8.13-d, which comprises or consists essentially of the following sequence or a fragment thereof having adenosine deaminase activity.

ABE8.13-d
MSEVEFSHEYWMRHALTLAKRAWDEREVPVGAVLVHNNRVIGEGWNRPIGRHDPTAHAEIMA
LRQGGLVMQNYRLIDATLYVTLEPCVMCAGAMIHSRIGRVVFGARDAKTGAAGSLMDVLHHP
GMNHRVEITEGILADECAALLSDFFRMRRQEIKAQKKAQSSTDSGGSSGGSSGSETPGTSES
ATPESSGGSSGGSSEVEFSHEYWMRHALTLAKRARDEREVPVGAVLVLNNRVIGEGWNRAIG
LHDPTAHAEIMALRQGGLVMQNYRLYDATLYVTFEPCVMCAGAMIHSRIGRVVFGVRNAKTG
AAGSLMDVLHHPGMNHRVEITEGILADECAALLCRFFRMPRRVFNAQKKAQSSTDSGGSSGG
SSGSETPGTSESATPESSGGSSGGSDKKYSIGL [symbol] IGTNSVGWAVITDEYKVPSKKFKVLGNT
DRHSIKKNLIGALLFDSGETAEATRLKRTARRRYTRRKNRICYLQEIFSNEMAKVDDSFFHR
LEESFLVEEDKKHERHPIFGNIVDEVAYHEKYPTIYHLRKKLVDSTDKADLRLIYLALAHMI
KFRGHFLIEGDLNPDNSDVDKLFIQLVQTYNQLFEENPINASGVDAKAILSARLSKSRRLEN
LIAQLPGEKKNGLFGNLIALSLGLTPNFKSNFDLAEDAKLQLSKDTYDDDLDNLLAQIGDQY
ADLFLAAKNLSDAILLSDILRVNTEITKAPLSASMIKRYDEHHQDLTLLKALVRQQLPEKYK
EIFFDQSKNGYAGYIDGGASQEEFYKFIKPILEKMDGTEELLVKLNREDLLRKQRTFDNGSI
PHQIHLGELHAILRRQEDFYPFLKDNREKIEKILTFRIPYYVGPLARGNSRFAWMTRKSEET
ITPWNFEEVVDKGASAQSFIERMTNFDKNLPNEKVLPKHSLLYEYFTVYNELTKVKYVTEGM
RKPAFLSGEQKKAIVDLLFKTNRKVTVKQLKEDYFKKIECFDSVEISGVEDRFNASLGTYHD
LLKIIKDKDFLDNEENEDILEDIVLTLTLFEDREMIEERLKTYAHLFDDKVMKQLKRRRYTG
WGRLSRKLINGIRDKQSGKTILDFLKSDGFANRNFMQLIHDDSLTFKEDIQKAQVSGQGDSL
HEHIANLAGSPAIKKGILQTVKVVDELVKVMGRHKPENIVIEMARENQTTQKGQKNSRERMK
RIEEGIKELGSQILKEHPVENTQLQNEKLYLYYLQNGRDMYVDQELDINRLSDYDVDHIVPQ
SFLKDDSIDNKVLTRSDKNRGKSDNVPSEEVVKKMKNYWRQLLNAKLITQRKFDNLTKAERG
GLSELDKAGFIKRQLVETRQITKHVAQILDSRMNTKYDENDKLIREVKVITLKSKLVSDFRK
DFQFYKVREINNYHHAHDAYLNAVVGTALIKKYPKLESEFVYGDYKVYDVRKMIAKSEQEIG
KATAKYFFYSNIMNFFKTEITLANGEIRKRPLIETNGETGEIVWDKGRDFATVRKVLSMPQV
NIVKKTEVQTGGFSKESILPKRNSDKLIARKKDWDPKKYGGFDSPTVAYSVLVVAKVEKGKS
KKLKSVKELLGITIMERSSFEKNPIDFLEAKGYKEVKKDLIIKLPKYSLFELENGRKRMLAS
AGELQKGNELALPSKYVNFLYLASHYEKLKGSPEDNEQKQLFVEQHKHYLDEIIEQISEFSK
RVILADANLDKVLSAYNKHRDKPIREQAENIIHLFTLTNLGAPAAFKYFDTTIDRKRYTSTK
EVLDATLIHQSITGLYETRIDLSQLGGDEGADKRTADGSEFESPKKKRKV*

[0610] In the above sequence, the plain text denotes an adenosine deaminase sequence, bold sequence indicates sequence derived from Cas9, the italicized sequence denotes a linker sequence, underlined sequence denotes a bipartite nuclear localization sequence, and double underlined sequence indicates mutations.

[0611] In some embodiments, the base editor is ABE8.17-m, which comprises or consists essentially of the following sequence or a fragment thereof having adenosine deaminase activity:

ABE8.17-m
MSEVEFSHEYWMRHALTLAKRARDEREVPVGAVLVLNNRVIGEGWNRAIGLHDPTAHAEIMA
LRQGGLVMQNYRLIDATLYSTFEPCVMCAGAMIHSRIGRVVFGVRNAKTGAAGSLMDVLHYP
GMNHRVEITEGILADECAALLCYFFRMPRRVFNAQKKAQSSTDSGGSSGGSSGSETPGTSES
ATPESSGGSSGGSDKKYSIGL [symbol] IGTNSVGWAVITDEYKVPSKKFKVLGNTDRHSIKKNLIGA
LLFDSGETAEATRLKRTARRRYTRRKNRICYLQEIFSNEMAKVDDSFFHRLEESFLVEEDKK
HERHPIFGNIVDEVAYHEKYPTIYHLRKKLVDSTDKADLRLIYLALAHMIKFRGHFLIEGDL
NPDNSDVDKLFIQLVQTYNQLFEENPINASGVDAKAILSARLSKSRRLENLIAQLPGEKKNG
LFGNLIALSLGLTPNFKSNFDLAEDAKLQLSKDTYDDDLDNLLAQIGDQYADLFLAAKNLSD
AILLSDILRVNTEITKAPLSASMIKRYDEHHQDLTLLKALVRQQLPEKYKEIFFDQSKNGYA
GYIDGGASQEEFYKFIKPILEKMDGTEELLVKLNREDLLRKQRTFDNGSIPHQIHLGELHAI
LRRQEDFYPFLKDNREKIEKILTFRIPYYVGPLARGNSRFAWMTRKSEETITPWNFEEVVDK
GASAQSFIERMTNFDKNLPNEKVLPKHSLLYEYFTVYNELTKVKYVTEGMRKPAFLSGEQKK
AIVDLLFKTNRKVTVKQLKEDYFKKIECFDSVEISGVEDRFNASLGTYHDLLKIIKDKDFLD
NEENEDILEDIVLTLTLFEDREMIEERLKTYAHLFDDKVMKQLKRRRYTGWGRLSRKLINGI
RDKQSGKTILDFLKSDGFANRNFMQLIHDDSLTFKEDIQKAQVSGQGDSLHEHIANLAGSPA
IKKGILQTVKVVDELVKVMGRHKPENIVIEMARENQTTQKGQKNSRERMKRIEEGIKELGSQ
ILKEHPVENTQLQNEKLYLYYLQNGRDMYVDQELDINRLSDYDVDHIVPQSFLKDDSIDNKV
LTRSDKNRGKSDNVPSEEVVKKMKNYWRQLLNAKLITQRKFDNLTKAERGGLSELDKAGFIK
RQLVETRQITKHVAQILDSRMNTKYDENDKLIREVKVITLKSKLVSDFRKDFQFYKVREINN
YHHAHDAYLNAVVGTALIKKYPKLESEFVYGDYKVYDVRKMIAKSEQEIGKATAKYFFYSNI
MNFFKTEITLANGEIRKRPLIETNGETGEIVWDKGRDFATVRKVLSMPQVNIVKKTEVQTGG
FSKESILPKRNSDKLIARKKDWDPKKYGGFDSPTVAYSVLVVAKVEKGKSKKLKSVKELLGI
TIMERSSFEKNPIDFLEAKGYKEVKKDLIIKLPKYSLFELENGRKRMLASAGELQKGNELAL
PSKYVNFLYLASHYEKLKGSPEDNEQKQLFVEQHKHYLDEIIEQISEFSKRVILADANLDKV
LSAYNKHRDKPIREQAENIIHLFTLTNLGAPAAFKYFDTTIDRKRYTSTKEVLDATLIHQSI
TGLYETRIDLSQLGGDEGADKRTADGSEFESPKKKRKV*

[0612] In the above sequence, the plain text denotes an adenosine deaminase sequence, bold sequence indicates sequence derived from Cas9, the italicized sequence denotes a linker sequence, underlined sequence denotes a bipartite nuclear localization sequence, and double underlined sequence indicates mutations.

[0613] In some embodiments, the base editor is ABE8.17-d, which comprises or consists essentially of the following sequence or a fragment thereof having adenosine deaminase activity:

ABE8.17-d
MSEVEFSHEYWMRHALTLAKRAWDEREVPVGAVLVHNNRVIGEGWNRPIGRHDPTAHAEIMA
LRQGGLVMQNYRLIDATLYVTLEPCVMCAGAMIHSRIGRVVFGARDAKTGAAGSLMDVLHHP
GMNHRVEITEGILADECAALLSDFFRMRRQEIKAQKKAQSSTDSGGSSGGSSGSETPGTSES
ATPESSGGSSGGSSEVEFSHEYWMRHALTLAKRARDEREVPVGAVLVLNNRVIGEGWNRAIG
LHDPTAHAEIMALRQGGLVMQNYRLIDATLYSTFEPCVMCAGAMIHSRIGRVVFGVRNAKTG
AAGSLMDVLHYPGMNHRVEITEGILADECAALLCYFFRMPRRVFNAQKKAQSSTDSGGSSGG
SSGSETPGTSESATPESSGGSSGGSDKKYSIGL [symbol] IGTNSVGWAVITDEYKVPSKKFKVLGNT
DRHSIKKNLIGALLFDSGETAEATRLKRTARRRYTRRKNRICYLQEIFSNEMAKVDDSFFHR
LEESFLVEEDKKHERHPIFGNIVDEVAYHEKYPTIYHLRKKLVDSTDKADLRLIYLALAHMI
KFRGHFLIEGDLNPDNSDVDKLFIQLVQTYNQLFEENPINASGVDAKAILSARLSKSRRLEN
LIAQLPGEKKNGLFGNLIALSLGLTPNFKSNFDLAEDAKLQLSKDTYDDDLDNLLAQIGDQY
ADLFLAAKNLSDAILLSDILRVNTEITKAPLSASMIKRYDEHHQDLTLLKALVRQQLPEKYK
EIFFDQSKNGYAGYIDGGASQEEFYKFIKPILEKMDGTEELLVKLNREDLLRKQRTFDNGSI
PHQIHLGELHAILRRQEDFYPFLKDNREKIEKILTFRIPYYVGPLARGNSRFAWMTRKSEET
ITPWNFEEVVDKGASAQSFIERMTNFDKNLPNEKVLPKHSLLYEYFTVYNELTKVKYVTEGM
RKPAFLSGEQKKAIVDLLFKTNRKVTVKQLKEDYFKKIECFDSVEISGVEDRFNASLGTYHD
LLKIIKDKDFLDNEENEDILEDIVLTLTLFEDREMIEERLKTYAHLFDDKVMKQLKRRRYTG
WGRLSRKLINGIRDKQSGKTILDFLKSDGFANRNFMQLIHDDSLTFKEDIQKAQVSGQGDSL
HEHIANLAGSPAIKKGILQTVKVVDELVKVMGRHKPENIVIEMARENQTTQKGQKNSRERMK
RIEEGIKELGSQILKEHPVENTQLQNEKLYLYYLQNGRDMYVDQELDINRLSDYDVDHIVPQ
SFLKDDSIDNKVLTRSDKNRGKSDNVPSEEVVKKMKNYWRQLLNAKLITQRKFDNLTKAERG
GLSELDKAGFIKRQLVETRQITKHVAQILDSRMNTKYDENDKLIREVKVITLKSKLVSDFRK
DFQFYKVREINNYHHAHDAYLNAVVGTALIKKYPKLESEFVYGDYKVYDVRKMIAKSEQEIG
KATAKYFFYSNIMNFFKTEITLANGEIRKRPLIETNGETGEIVWDKGRDFATVRKVLSMPQV
NIVKKTEVQTGGFSKESILPKRNSDKLIARKKDWDPKKYGGFDSPTVAYSVLVVAKVEKGKS
KKLKSVKELLGITIMERSSFEKNPIDFLEAKGYKEVKKDLIIKLPKYSLFELENGRKRMLAS
AGELQKGNELALPSKYVNFLYLASHYEKLKGSPEDNEQKQLFVEQHKHYLDEIIEQISEFSK
RVILADANLDKVLSAYNKHRDKPIREQAENIIHLFTLTNLGAPAAFKYFDTTIDRKRYTSTK
EVLDATLIHQSITGLYETRIDLSQLGGDEGADKRTADGSEFESPKKKRKV*

[0614] In the above sequence, the plain text denotes an adenosine deaminase sequence, bold sequence indicates sequence derived from Cas9, the italicized sequence denotes a linker sequence, underlined sequence denotes a bipartite nuclear localization sequence, and double underlined sequence indicates mutations.

[0615] In some embodiments, the base editor is ABE8.20-m, which comprises or consists essentially of the following sequence or a fragment thereof having adenosine deaminase activity:

ABE8.20-m
MSEVEFSHEYWMRHALTLAKRARDEREVPVGAVLVLNNRVIGEGWNRAIGLHDPTAHAEIMA
LRQGGLVMQNYRLYDATLYSTFEPCVMCAGAMIHSRIGRVVFGVRNAKTGAAGSLMDVLHHP
GMNHRVEITEGILADECAALLCRFFRMPRRVFNAQKKAQSSTDSGGSSGGSSGSETPGTSES
ATPESSGGSSGGSDKKYSIGL [symbol] IGTNSVGWAVITDEYKVPSKKFKVLGNTDRHSIKKNLIGA
LLFDSGETAEATRLKRTARRRYTRRKNRICYLQEIFSNEMAKVDDSFFHRLEESFLVEEDKK
HERHPIFGNIVDEVAYHEKYPTIYHLRKKLVDSTDKADLRLIYLALAHMIKFRGHFLIEGDL
NPDNSDVDKLFIQLVQTYNQLFEENPINASGVDAKAILSARLSKSRRLENLIAQLPGEKKNG
LFGNLIALSLGLTPNFKSNFDLAEDAKLQLSKDTYDDDLDNLLAQIGDQYADLFLAAKNLSD
AILLSDILRVNTEITKAPLSASMIKRYDEHHQDLTLLKALVRQQLPEKYKEIFFDQSKNGYA
GYIDGGASQEEFYKFIKPILEKMDGTEELLVKLNREDLLRKQRTFDNGSIPHQIHLGELHAI
LRRQEDFYPFLKDNREKIEKILTFRIPYYVGPLARGNSRFAWMTRKSEETITPWNFEEVVDK
GASAQSFIERMTNFDKNLPNEKVLPKHSLLYEYFTVYNELTKVKYVTEGMRKPAFLSGEQKK
AIVDLLFKTNRKVTVKQLKEDYFKKIECFDSVEISGVEDRFNASLGTYHDLLKIIKDKDFLD
NEENEDILEDIVLTLTLFEDREMIEERLKTYAHLFDDKVMKQLKRRRYTGWGRLSRKLINGI
RDKQSGKTILDFLKSDGFANRNFMQLIHDDSLTFKEDIQKAQVSGQGDSLHEHIANLAGSPA
IKKGILQTVKVVDELVKVMGRHKPENIVIEMARENQTTQKGQKNSRERMKRIEEGIKELGSQ
ILKEHPVENTQLQNEKLYLYYLQNGRDMYVDQELDINRLSDYDVDHIVPQSFLKDDSIDNKV
LTRSDKNRGKSDNVPSEEVVKKMKNYWRQLLNAKLITQRKFDNLTKAERGGLSELDKAGFIK
RQLVETRQITKHVAQILDSRMNTKYDENDKLIREVKVITLKSKLVSDFRKDFQFYKVREINN
YHHAHDAYLNAVVGTALIKKYPKLESEFVYGDYKVYDVRKMIAKSEQEIGKATAKYFFYSNI
MNFFKTEITLANGEIRKRPLIETNGETGEIVWDKGRDFATVRKVLSMPQVNIVKKTEVQTGG
FSKESILPKRNSDKLIARKKDWDPKKYGGFDSPTVAYSVLVVAKVEKGKSKKLKSVKELLGI
TIMERSSFEKNPIDFLEAKGYKEVKKDLIIKLPKYSLFELENGRKRMLASAGELQKGNELAL
PSKYVNFLYLASHYEKLKGSPEDNEQKQLFVEQHKHYLDEIIEQISEFSKRVILADANLDKV
LSAYNKHRDKPIREQAENIIHLFTLTNLGAPAAFKYFDTTIDRKRYTSTKEVLDATLIHQSI
TGLYETRIDLSQLGGDEGADKRTADGSEFESPKKKRKV*

[0616] In the above sequence, the plain text denotes an adenosine deaminase sequence, bold sequence indicates sequence derived from Cas9, the italicized sequence denotes a linker sequence, underlined sequence denotes a bipartite nuclear localization sequence, and double underlined sequence indicates mutations.

[0617] In some embodiments, the base editor is ABE8.20-d, which comprises or consists essentially of the following sequence or a fragment thereof having adenosine deaminase activity:

ABE8.20-d
MSEVEFSHEYWMRHALTLAKRAWDEREVPVGAVLVHNNRVIGEGWNRPIGRHDPTAHAEIMA
LRQGGLVMQNYRLIDATLYVTLEPCVMCAGAMIHSRIGRVVFGARDAKTGAAGSLMDVLHHP
GMNHRVEITEGILADECAALLSDFFRMRRQEIKAQKKAQSSTDSGGSSGGSSGSETPGTSES
ATPESSGGSSGGSSEVEFSHEYWMRHALTLAKRARDEREVPVGAVLVLNNRVIGEGWNRAIG
LHDPTAHAEIMALRQGGLVMQNYRLYDATLYSTFEPCVMCAGAMIHSRIGRVVFGVRNAKTG
AAGSLMDVLHHPGMNHRVEITEGILADECAALLCRFFRMPRRVFNAQKKAQSSTDSGGSSGG
SSGSETPGTSESATPESSGGSSGGSDKKYSIGL [symbol] IGTNSVGWAVITDEYKVPSKKFKVLGNT
DRHSIKKNLIGALLFDSGETAEATRLKRTARRRYTRRKNRICYLQEIFSNEMAKVDDSFFHR
LEESFLVEEDKKHERHPIFGNIVDEVAYHEKYPTIYHLRKKLVDSTDKADLRLIYLALAHMI
KFRGHFLIEGDLNPDNSDVDKLFIQLVQTYNQLFEENPINASGVDAKAILSARLSKSRRLEN
LIAQLPGEKKNGLFGNLIALSLGLTPNFKSNFDLAEDAKLQLSKDTYDDDLDNLLAQIGDQY
ADLFLAAKNLSDAILLSDILRVNTEITKAPLSASMIKRYDEHHQDLTLLKALVRQQLPEKYK
EIFFDQSKNGYAGYIDGGASQEEFYKFIKPILEKMDGTEELLVKLNREDLLRKQRTFDNGSI
PHQIHLGELHAILRRQEDFYPFLKDNREKIEKILTFRIPYYVGPLARGNSRFAWMTRKSEET
ITPWNFEEVVDKGASAQSFIERMTNFDKNLPNEKVLPKHSLLYEYFTVYNELTKVKYVTEGM
RKPAFLSGEQKKAIVDLLFKTNRKVTVKQLKEDYFKKIECFDSVEISGVEDRFNASLGTYHD
LLKIIKDKDFLDNEENEDILEDIVLTLTLFEDREMIEERLKTYAHLFDDKVMKQLKRRRYTG
WGRLSRKLINGIRDKQSGKTILDFLKSDGFANRNFMQLIHDDSLTFKEDIQKAQVSGQGDSL
HEHIANLAGSPAIKKGILQTVKVVDELVKVMGRHKPENIVIEMARENQTTQKGQKNSRERMK
RIEEGIKELGSQILKEHPVENTQLQNEKLYLYYLQNGRDMYVDQELDINRLSDYDVDHIVPQ
SFLKDDSIDNKVLTRSDKNRGKSDNVPSEEVVKKMKNYWRQLLNAKLITQRKFDNLTKAERG
GLSELDKAGFIKRQLVETRQITKHVAQILDSRMNTKYDENDKLIREVKVITLKSKLVSDFRK
DFQFYKVREINNYHHAHDAYLNAVVGTALIKKYPKLESEFVYGDYKVYDVRKMIAKSEQEIG
KATAKYFFYSNIMNFFKTEITLANGEIRKRPLIETNGETGEIVWDKGRDFATVRKVLSMPQV
NIVKKTEVQTGGFSKESILPKRNSDKLIARKKDWDPKKYGGFDSPTVAYSVLVVAKVEKGKS
KKLKSVKELLGITIMERSSFEKNPIDFLEAKGYKEVKKDLIIKLPKYSLFELENGRKRMLAS
AGELQKGNELALPSKYVNFLYLASHYEKLKGSPEDNEQKQLFVEQHKHYLDEIIEQISEFSK
RVILADANLDKVLSAYNKHRDKPIREQAENIIHLFTLTNLGAPAAFKYFDTTIDRKRYTSTK
EVLDATLIHQSITGLYETRIDLSQLGGDEGADKRTADGSEFESPKKKRKV*

[0618] In the above sequence, the plain text denotes an adenosine deaminase sequence, bold sequence indicates sequence derived from Cas9, the italicized sequence denotes a linker sequence, underlined sequence denotes a bipartite nuclear localization sequence, and double underlined sequence indicates mutations.

[0619] In some embodiments, a ABE8 of the invention is selected from the following sequences:

01. monoABE8.1_bpNLS + Y147T
MSEVEFSHEYWMRHALTLAKRARDEREVPVGAVLVLNNRVIGEGWNRAIGLHDPTAHAEIMA
LRQGGLVMQNYRLIDATLYVTFEPCVMCAGAMIHSRIGRVVFGVRNAKTGAAGSLMDVLHYP
GMNHRVEITEGILADECAALLCTFFRMPRQVFNAQKKAQSSTDSGGSSGGSSGSETPGTSES
ATPESSGGSSGGSDKKYSIGLAIGTNSVGWAVITDEYKVPSKKFKVLGNTDRHSIKKNLIGA
LLFDSGETAEATRLKRTARRRYTRRKNRICYLQEIFSNEMAKVDDSFFHRLEESFLVEEDKK
HERHPIFGNIVDEVAYHEKYPTIYHLRKKLVDSTDKADLRLIYLALAHMIKFRGHFLIEGDL
NPDNSDVDKLFIQLVQTYNQLFEENPINASGVDAKAILSARLSKSRRLENLIAQLPGEKKNG
LFGNLIALSLGLTPNFKSNFDLAEDAKLQLSKDTYDDDLDNLLAQIGDQYADLFLAAKNLSD
AILLSDILRVNTEITKAPLSASMIKRYDEHHQDLTLLKALVRQQLPEKYKEIFFDQSKNGYA
GYIDGGASQEEFYKFIKPILEKMDGTEELLVKLNREDLLRKQRTFDNGSIPHQIHLGELHAI
LRRQEDFYPFLKDNREKIEKILTFRIPYYVGPLARGNSRFAWMTRKSEETITPWNFEEVVDK
GASAQSFIERMTNFDKNLPNEKVLPKHSLLYEYFTVYNELTKVKYVTEGMRKPAFLSGEQKK
AIVDLLFKTNRKVTVKQLKEDYFKKIECFDSVEISGVEDRFNASLGTYHDLLKIIKDKDFLD
NEENEDILEDIVLTLTLFEDREMIEERLKTYAHLFDDKVMKQLKRRRYTGWGRLSRKLINGI
RDKQSGKTILDFLKSDGFANRNFMQLIHDDSLTFKEDIQKAQVSGQGDSLHEHIANLAGSPA
IKKGILQTVKVVDELVKVMGRHKPENIVIEMARENQTTQKGQKNSRERMKRIEEGIKELGSQ
ILKEHPVENTQLQNEKLYLYYLQNGRDMYVDQELDINRLSDYDVDHIVPQSFLKDDSIDNKV
LTRSDKNRGKSDNVPSEEVVKKMKNYWRQLLNAKLITQRKFDNLTKAERGGLSELDKAGFIK
RQLVETRQITKHVAQILDSRMNTKYDENDKLIREVKVITLKSKLVSDFRKDFQFYKVREINN
YHHAHDAYLNAVVGTALIKKYPKLESEFVYGDYKVYDVRKMIAKSEQEIGKATAKYFFYSNI
MNFFKTEITLANGEIRKRPLIETNGETGEIVWDKGRDFATVRKVLSMPQVNIVKKTEVQTGG
FSKESILPKRNSDKLIARKKDWDPKKYGGFVSPTVAYSVLVVAKVEKGKSKKLKSVKELLGI
TIMERSSFEKNPIDFLEAKGYKEVKKDLIIKLPKYSLFELENGRKRMLASARELQKGNELAL
PSKYVNFLYLASHYEKLKGSPEDNEQKQLFVEQHKHYLDEIIEQISEFSKRVILADANLDKV
LSAYNKHRDKPIREQAENIIHLFTLTNLGAPAAFKYFDTTIDRKQYRSTKEVLDATLIHQSI
TGLYETRIDLSQLGGDEGADKRTADGSEFESPKKKRKV
02. monoABE8.1_bpNLS + Y147R
MSEVEFSHEYWMRHALTLAKRARDEREVPVGAVLVLNNRVIGEGWNRAIGLHDPTAHAEIMA
LRQGGLVMQNYRLIDATLYVTFEPCVMCAGAMIHSRIGRVVFGVRNAKTGAAGSLMDVLHYP
GMNHRVEITEGILADECAALLCRFFRMPRQVFNAQKKAQSSTDSGGSSGGSSGSETPGTSES
ATPESSGGSSGGSDKKYSIGLAIGTNSVGWAVITDEYKVPSKKFKVLGNTDRHSIKKNLIGA
LLFDSGETAEATRLKRTARRRYTRRKNRICYLQEIFSNEMAKVDDSFFHRLEESFLVEEDKK
HERHPIFGNIVDEVAYHEKYPTIYHLRKKLVDSTDKADLRLIYLALAHMIKFRGHFLIEGDL
NPDNSDVDKLFIQLVQTYNQLFEENPINASGVDAKAILSARLSKSRRLENLIAQLPGEKKNG
LFGNLIALSLGLTPNFKSNFDLAEDAKLQLSKDTYDDDLDNLLAQIGDQYADLFLAAKNLSD
AILLSDILRVNTEITKAPLSASMIKRYDEHHQDLTLLKALVRQQLPEKYKEIFFDQSKNGYA
GYIDGGASQEEFYKFIKPILEKMDGTEELLVKLNREDLLRKQRTFDNGSIPHQIHLGELHAI
LRRQEDFYPFLKDNREKIEKILTFRIPYYVGPLARGNSRFAWMTRKSEETITPWNFEEVVDK
GASAQSFIERMTNFDKNLPNEKVLPKHSLLYEYFTVYNELTKVKYVTEGMRKPAFLSGEQKK
AIVDLLFKTNRKVTVKQLKEDYFKKIECFDSVEISGVEDRFNASLGTYHDLLKIIKDKDFLD
NEENEDILEDIVLTLTLFEDREMIEERLKTYAHLFDDKVMKQLKRRRYTGWGRLSRKLINGI
RDKQSGKTILDFLKSDGFANRNFMQLIHDDSLTFKEDIQKAQVSGQGDSLHEHIANLAGSPA
IKKGILQTVKVVDELVKVMGRHKPENIVIEMARENQTTQKGQKNSRERMKRIEEGIKELGSQ
ILKEHPVENTQLQNEKLYLYYLQNGRDMYVDQELDINRLSDYDVDHIVPQSFLKDDSIDNKV
LTRSDKNRGKSDNVPSEEVVKKMKNYWRQLLNAKLITQRKFDNLTKAERGGLSELDKAGFIK
RQLVETRQITKHVAQILDSRMNTKYDENDKLIREVKVITLKSKLVSDFRKDFQFYKVREINN
YHHAHDAYLNAVVGTALIKKYPKLESEFVYGDYKVYDVRKMIAKSEQEIGKATAKYFFYSNI
MNFFKTEITLANGEIRKRPLIETNGETGEIVWDKGRDFATVRKVLSMPQVNIVKKTEVQTGG
FSKESILPKRNSDKLIARKKDWDPKKYGGFVSPTVAYSVLVVAKVEKGKSKKLKSVKELLGI
TIMERSSFEKNPIDFLEAKGYKEVKKDLIIKLPKYSLFELENGRKRMLASARELQKGNELAL
PSKYVNFLYLASHYEKLKGSPEDNEQKQLFVEQHKHYLDEIIEQISEFSKRVILADANLDKV
LSAYNKHRDKPIREQAENIIHLFTLTNLGAPAAFKYFDTTIDRKQYRSTKEVLDATLIHQSI
TGLYETRIDLSQLGGDEGADKRTADGSEFESPKKKRKV
03. monoABE8.1_bpNLS + Q154S
MSEVEFSHEYWMRHALTLAKRARDEREVPVGAVLVLNNRVIGEGWNRAIGLHDPTAHAEIMA
LRQGGLVMQNYRLIDATLYVTFEPCVMCAGAMIHSRIGRVVFGVRNAKTGAAGSLMDVLHYP
GMNHRVEITEGILADECAALLCYFFRMPRSVFNAQKKAQSSTDSGGSSGGSSGSETPGTSES
ATPESSGGSSGGSDKKYSIGLAIGTNSVGWAVITDEYKVPSKKFKVLGNTDRHSIKKNLIGA
LLFDSGETAEATRLKRTARRRYTRRKNRICYLQEIFSNEMAKVDDSFFHRLEESFLVEEDKK
HERHPIFGNIVDEVAYHEKYPTIYHLRKKLVDSTDKADLRLIYLALAHMIKFRGHFLIEGDL
NPDNSDVDKLFIQLVQTYNQLFEENPINASGVDAKAILSARLSKSRRLENLIAQLPGEKKNG
LFGNLIALSLGLTPNFKSNFDLAEDAKLQLSKDTYDDDLDNLLAQIGDQYADLFLAAKNLSD
AILLSDILRVNTEITKAPLSASMIKRYDEHHQDLTLLKALVRQQLPEKYKEIFFDQSKNGYA
GYIDGGASQEEFYKFIKPILEKMDGTEELLVKLNREDLLRKQRTFDNGSIPHQIHLGELHAI
LRRQEDFYPFLKDNREKIEKILTFRIPYYVGPLARGNSRFAWMTRKSEETITPWNFEEVVDK
GASAQSFIERMTNFDKNLPNEKVLPKHSLLYEYFTVYNELTKVKYVTEGMRKPAFLSGEQKK
AIVDLLFKTNRKVTVKQLKEDYFKKIECFDSVEISGVEDRFNASLGTYHDLLKIIKDKDFLD
NEENEDILEDIVLTLTLFEDREMIEERLKTYAHLFDDKVMKQLKRRRYTGWGRLSRKLINGI
RDKQSGKTILDFLKSDGFANRNFMQLIHDDSLTFKEDIQKAQVSGQGDSLHEHIANLAGSPA
IKKGILQTVKVVDELVKVMGRHKPENIVIEMARENQTTQKGQKNSRERMKRIEEGIKELGSQ
ILKEHPVENTQLQNEKLYLYYLQNGRDMYVDQELDINRLSDYDVDHIVPQSFLKDDSIDNKV
LTRSDKNRGKSDNVPSEEVVKKMKNYWRQLLNAKLITQRKFDNLTKAERGGLSELDKAGFIK
RQLVETRQITKHVAQILDSRMNTKYDENDKLIREVKVITLKSKLVSDFRKDFQFYKVREINN
YHHAHDAYLNAVVGTALIKKYPKLESEFVYGDYKVYDVRKMIAKSEQEIGKATAKYFFYSNI
MNFFKTEITLANGEIRKRPLIETNGETGEIVWDKGRDFATVRKVLSMPQVNIVKKTEVQTGG
FSKESILPKRNSDKLIARKKDWDPKKYGGFVSPTVAYSVLVVAKVEKGKSKKLKSVKELLGI
TIMERSSFEKNPIDFLEAKGYKEVKKDLIIKLPKYSLFELENGRKRMLASARELQKGNELAL
PSKYVNFLYLASHYEKLKGSPEDNEQKQLFVEQHKHYLDEIIEQISEFSKRVILADANLDKV
LSAYNKHRDKPIREQAENIIHLFTLTNLGAPAAFKYFDTTIDRKQYRSTKEVLDATLIHQSI
TGLYETRIDLSQLGGDEGADKRTADGSEFESPKKKRKV
04. monoABE8.1_bpNLS + Y123H
MSEVEFSHEYWMRHALTLAKRARDEREVPVGAVLVLNNRVIGEGWNRAIGLHDPTAHAEIMA
LRQGGLVMQNYRLIDATLYVTFEPCVMCAGAMIHSRIGRVVFGVRNAKTGAAGSLMDVLHHP
GMNHRVEITEGILADECAALLCYFFRMPRQVFNAQKKAQSSTDSGGSSGGSSGSETPGTSES
ATPESSGGSSGGSDKKYSIGLAIGTNSVGWAVITDEYKVPSKKFKVLGNTDRHSIKKNLIGA
LLFDSGETAEATRLKRTARRRYTRRKNRICYLQEIFSNEMAKVDDSFFHRLEESFLVEEDKK
HERHPIFGNIVDEVAYHEKYPTIYHLRKKLVDSTDKADLRLIYLALAHMIKFRGHFLIEGDL
NPDNSDVDKLFIQLVQTYNQLFEENPINASGVDAKAILSARLSKSRRLENLIAQLPGEKKNG
LFGNLIALSLGLTPNFKSNFDLAEDAKLQLSKDTYDDDLDNLLAQIGDQYADLFLAAKNLSD
AILLSDILRVNTEITKAPLSASMIKRYDEHHQDLTLLKALVRQQLPEKYKEIFFDQSKNGYA
GYIDGGASQEEFYKFIKPILEKMDGTEELLVKLNREDLLRKQRTFDNGSIPHQIHLGELHAI
LRRQEDFYPFLKDNREKIEKILTFRIPYYVGPLARGNSRFAWMTRKSEETITPWNFEEVVDK
GASAQSFIERMTNFDKNLPNEKVLPKHSLLYEYFTVYNELTKVKYVTEGMRKPAFLSGEQKK
AIVDLLFKTNRKVTVKQLKEDYFKKIECFDSVEISGVEDRFNASLGTYHDLLKIIKDKDFLD
NEENEDILEDIVLTLTLFEDREMIEERLKTYAHLFDDKVMKQLKRRRYTGWGRLSRKLINGI
RDKQSGKTILDFLKSDGFANRNFMQLIHDDSLTFKEDIQKAQVSGQGDSLHEHIANLAGSPA
IKKGILQTVKVVDELVKVMGRHKPENIVIEMARENQTTQKGQKNSRERMKRIEEGIKELGSQ
ILKEHPVENTQLQNEKLYLYYLQNGRDMYVDQELDINRLSDYDVDHIVPQSFLKDDSIDNKV
LTRSDKNRGKSDNVPSEEVVKKMKNYWRQLLNAKLITQRKFDNLTKAERGGLSELDKAGFIK
RQLVETRQITKHVAQILDSRMNTKYDENDKLIREVKVITLKSKLVSDFRKDFQFYKVREINN
YHHAHDAYLNAVVGTALIKKYPKLESEFVYGDYKVYDVRKMIAKSEQEIGKATAKYFFYSNI
MNFFKTEITLANGEIRKRPLIETNGETGEIVWDKGRDFATVRKVLSMPQVNIVKKTEVQTGG
FSKESILPKRNSDKLIARKKDWDPKKYGGFVSPTVAYSVLVVAKVEKGKSKKLKSVKELLGI
TIMERSSFEKNPIDFLEAKGYKEVKKDLIIKLPKYSLFELENGRKRMLASARELQKGNELAL
PSKYVNFLYLASHYEKLKGSPEDNEQKQLFVEQHKHYLDEIIEQISEFSKRVILADANLDKV
LSAYNKHRDKPIREQAENIIHLFTLTNLGAPAAFKYFDTTIDRKQYRSTKEVLDATLIHQSI
TGLYETRIDLSQLGGDEGADKRTADGSEFESPKKKRKV
05. monoABE8.1_bpNLS + V82S
MSEVEFSHEYWMRHALTLAKRARDEREVPVGAVLVLNNRVIGEGWNRAIGLHDPTAHAEIMA
LRQGGLVMQNYRLIDATLYSTFEPCVMCAGAMIHSRIGRVVFGVRNAKTGAAGSLMDVLHYP
GMNHRVEITEGILADECAALLCYFFRMPRQVFNAQKKAQSSTDSGGSSGGSSGSETPGTSES
ATPESSGGSSGGSDKKYSIGLAIGTNSVGWAVITDEYKVPSKKFKVLGNTDRHSIKKNLIGA
LLFDSGETAEATRLKRTARRRYTRRKNRICYLQEIFSNEMAKVDDSFFHRLEESFLVEEDKK
HERHPIFGNIVDEVAYHEKYPTIYHLRKKLVDSTDKADLRLIYLALAHMIKFRGHFLIEGDL
NPDNSDVDKLFIQLVQTYNQLFEENPINASGVDAKAILSARLSKSRRLENLIAQLPGEKKNG
LFGNLIALSLGLTPNFKSNFDLAEDAKLQLSKDTYDDDLDNLLAQIGDQYADLFLAAKNLSD
AILLSDILRVNTEITKAPLSASMIKRYDEHHQDLTLLKALVRQQLPEKYKEIFFDQSKNGYA
GYIDGGASQEEFYKFIKPILEKMDGTEELLVKLNREDLLRKQRTFDNGSIPHQIHLGELHAI
LRRQEDFYPFLKDNREKIEKILTFRIPYYVGPLARGNSRFAWMTRKSEETITPWNFEEVVDK
GASAQSFIERMTNFDKNLPNEKVLPKHSLLYEYFTVYNELTKVKYVTEGMRKPAFLSGEQKK
AIVDLLFKTNRKVTVKQLKEDYFKKIECFDSVEISGVEDRFNASLGTYHDLLKIIKDKDFLD
NEENEDILEDIVLTLTLFEDREMIEERLKTYAHLFDDKVMKQLKRRRYTGWGRLSRKLINGI
RDKQSGKTILDFLKSDGFANRNFMQLIHDDSLTFKEDIQKAQVSGQGDSLHEHIANLAGSPA
IKKGILQTVKVVDELVKVMGRHKPENIVIEMARENQTTQKGQKNSRERMKRIEEGIKELGSQ
ILKEHPVENTQLQNEKLYLYYLQNGRDMYVDQELDINRLSDYDVDHIVPQSFLKDDSIDNKV
LTRSDKNRGKSDNVPSEEVVKKMKNYWRQLLNAKLITQRKFDNLTKAERGGLSELDKAGFIK
RQLVETRQITKHVAQILDSRMNTKYDENDKLIREVKVITLKSKLVSDFRKDFQFYKVREINN
YHHAHDAYLNAVVGTALIKKYPKLESEFVYGDYKVYDVRKMIAKSEQEIGKATAKYFFYSNI
MNFFKTEITLANGEIRKRPLIETNGETGEIVWDKGRDFATVRKVLSMPQVNIVKKTEVQTGG
FSKESILPKRNSDKLIARKKDWDPKKYGGFVSPTVAYSVLVVAKVEKGKSKKLKSVKELLGI
TIMERSSFEKNPIDFLEAKGYKEVKKDLIIKLPKYSLFELENGRKRMLASARELQKGNELAL
PSKYVNFLYLASHYEKLKGSPEDNEQKQLFVEQHKHYLDEIIEQISEFSKRVILADANLDKV
LSAYNKHRDKPIREQAENIIHLFTLTNLGAPAAFKYFDTTIDRKQYRSTKEVLDATLIHQSI
TGLYETRIDLSQLGGDEGADKRTADGSEFESPKKKRKV
6. monoABE8.1_bpNLS + T166R
MSEVEFSHEYWMRHALTLAKRARDEREVPVGAVLVLNNRVIGEGWNRAIGLHDPTAHAEIMA
LRQGGLVMQNYRLIDATLYVTFEPCVMCAGAMIHSRIGRVVFGVRNAKTGAAGSLMDVLHYP
GMNHRVEITEGILADECAALLCYFFRMPRQVFNAQKKAQSSRDSGGSSGGSSGSETPGTSES
ATPESSGGSSGGSDKKYSIGLAIGTNSVGWAVITDEYKVPSKKFKVLGNTDRHSIKKNLIGA
LLFDSGETAEATRLKRTARRRYTRRKNRICYLQEIFSNEMAKVDDSFFHRLEESFLVEEDKK
HERHPIFGNIVDEVAYHEKYPTIYHLRKKLVDSTDKADLRLIYLALAHMIKFRGHFLIEGDL
NPDNSDVDKLFIQLVQTYNQLFEENPINASGVDAKAILSARLSKSRRLENLIAQLPGEKKNG
LFGNLIALSLGLTPNFKSNFDLAEDAKLQLSKDTYDDDLDNLLAQIGDQYADLFLAAKNLSD
AILLSDILRVNTEITKAPLSASMIKRYDEHHQDLTLLKALVRQQLPEKYKEIFFDQSKNGYA
GYIDGGASQEEFYKFIKPILEKMDGTEELLVKLNREDLLRKQRTFDNGSIPHQIHLGELHAI
LRRQEDFYPFLKDNREKIEKILTFRIPYYVGPLARGNSRFAWMTRKSEETITPWNFEEVVDK
GASAQSFIERMTNFDKNLPNEKVLPKHSLLYEYFTVYNELTKVKYVTEGMRKPAFLSGEQKK
AIVDLLFKTNRKVTVKQLKEDYFKKIECFDSVEISGVEDRFNASLGTYHDLLKIIKDKDFLD
NEENEDILEDIVLTLTLFEDREMIEERLKTYAHLFDDKVMKQLKRRRYTGWGRLSRKLINGI
RDKQSGKTILDFLKSDGFANRNFMQLIHDDSLTFKEDIQKAQVSGQGDSLHEHIANLAGSPA
IKKGILQTVKVVDELVKVMGRHKPENIVIEMARENQTTQKGQKNSRERMKRIEEGIKELGSQ
ILKEHPVENTQLQNEKLYLYYLQNGRDMYVDQELDINRLSDYDVDHIVPQSFLKDDSIDNKV
LTRSDKNRGKSDNVPSEEVVKKMKNYWRQLLNAKLITQRKFDNLTKAERGGLSELDKAGFIK
RQLVETRQITKHVAQILDSRMNTKYDENDKLIREVKVITLKSKLVSDFRKDFQFYKVREINN
YHHAHDAYLNAVVGTALIKKYPKLESEFVYGDYKVYDVRKMIAKSEQEIGKATAKYFFYSNI
MNFFKTEITLANGEIRKRPLIETNGETGEIVWDKGRDFATVRKVLSMPQVNIVKKTEVQTGG
FSKESILPKRNSDKLIARKKDWDPKKYGGFVSPTVAYSVLVVAKVEKGKSKKLKSVKELLGI
TIMERSSFEKNPIDFLEAKGYKEVKKDLIIKLPKYSLFELENGRKRMLASARELQKGNELAL
PSKYVNFLYLASHYEKLKGSPEDNEQKQLFVEQHKHYLDEIIEQISEFSKRVILADANLDKV
LSAYNKHRDKPIREQAENIIHLFTLTNLGAPAAFKYFDTTIDRKQYRSTKEVLDATLIHQSI
TGLYETRIDLSQLGGDEGADKRTADGSEFESPKKKRKV
7. monoABE8.1_bpNLS + Q154R
MSEVEFSHEYWMRHALTLAKRARDEREVPVGAVLVLNNRVIGEGWNRAIGLHDPTAHAEIMA
LRQGGLVMQNYRLIDATLYVTFEPCVMCAGAMIHSRIGRVVFGVRNAKTGAAGSLMDVLHYP
GMNHRVEITEGILADECAALLCYFFRMPRRVFNAQKKAQSSTDSGGSSGGSSGSETPGTSES
ATPESSGGSSGGSDKKYSIGLAIGTNSVGWAVITDEYKVPSKKFKVLGNTDRHSIKKNLIGA
LLFDSGETAEATRLKRTARRRYTRRKNRICYLQEIFSNEMAKVDDSFFHRLEESFLVEEDKK
HERHPIFGNIVDEVAYHEKYPTIYHLRKKLVDSTDKADLRLIYLALAHMIKFRGHFLIEGDL
NPDNSDVDKLFIQLVQTYNQLFEENPINASGVDAKAILSARLSKSRRLENLIAQLPGEKKNG
LFGNLIALSLGLTPNFKSNFDLAEDAKLQLSKDTYDDDLDNLLAQIGDQYADLFLAAKNLSD
AILLSDILRVNTEITKAPLSASMIKRYDEHHQDLTLLKALVRQQLPEKYKEIFFDQSKNGYA
GYIDGGASQEEFYKFIKPILEKMDGTEELLVKLNREDLLRKQRTFDNGSIPHQIHLGELHAI
LRRQEDFYPFLKDNREKIEKILTFRIPYYVGPLARGNSRFAWMTRKSEETITPWNFEEVVDK
GASAQSFIERMTNFDKNLPNEKVLPKHSLLYEYFTVYNELTKVKYVTEGMRKPAFLSGEQKK
AIVDLLFKTNRKVTVKQLKEDYFKKIECFDSVEISGVEDRFNASLGTYHDLLKIIKDKDFLD
NEENEDILEDIVLTLTLFEDREMIEERLKTYAHLFDDKVMKQLKRRRYTGWGRLSRKLINGI
RDKQSGKTILDFLKSDGFANRNFMQLIHDDSLTFKEDIQKAQVSGQGDSLHEHIANLAGSPA
IKKGILQTVKVVDELVKVMGRHKPENIVIEMARENQTTQKGQKNSRERMKRIEEGIKELGSQ
ILKEHPVENTQLQNEKLYLYYLQNGRDMYVDQELDINRLSDYDVDHIVPQSFLKDDSIDNKV
LTRSDKNRGKSDNVPSEEVVKKMKNYWRQLLNAKLITQRKFDNLTKAERGGLSELDKAGFIK
RQLVETRQITKHVAQILDSRMNTKYDENDKLIREVKVITLKSKLVSDFRKDFQFYKVREINN
YHHAHDAYLNAVVGTALIKKYPKLESEFVYGDYKVYDVRKMIAKSEQEIGKATAKYFFYSNI
MNFFKTEITLANGEIRKRPLIETNGETGEIVWDKGRDFATVRKVLSMPQVNIVKKTEVQTGG
FSKESILPKRNSDKLIARKKDWDPKKYGGFVSPTVAYSVLVVAKVEKGKSKKLKSVKELLGI
TIMERSSFEKNPIDFLEAKGYKEVKKDLIIKLPKYSLFELENGRKRMLASARELQKGNELAL
PSKYVNFLYLASHYEKLKGSPEDNEQKQLFVEQHKHYLDEIIEQISEFSKRVILADANLDKV
LSAYNKHRDKPIREQAENIIHLFTLTNLGAPAAFKYFDTTIDRKQYRSTKEVLDATLIHQSI
TGLYETRIDLSQLGGDEGADKRTADGSEFESPKKKRKV
08. monoABE8.1_bpNLS + Y147R_Q154R_Y123H
MSEVEFSHEYWMRHALTLAKRARDEREVPVGAVLVLNNRVIGEGWNRAIGLHDPTAHAEIMA
LRQGGLVMQNYRLIDATLYVTFEPCVMCAGAMIHSRIGRVVFGVRNAKTGAAGSLMDVLHHP
GMNHRVEITEGILADECAALLCRFFRMPRRVFNAQKKAQSSTDSGGSSGGSSGSETPGTSES
ATPESSGGSSGGSDKKYSIGLAIGTNSVGWAVITDEYKVPSKKFKVLGNTDRHSIKKNLIGA
LLFDSGETAEATRLKRTARRRYTRRKNRICYLQEIFSNEMAKVDDSFFHRLEESFLVEEDKK
HERHPIFGNIVDEVAYHEKYPTIYHLRKKLVDSTDKADLRLIYLALAHMIKFRGHFLIEGDL
NPDNSDVDKLFIQLVQTYNQLFEENPINASGVDAKAILSARLSKSRRLENLIAQLPGEKKNG
LFGNLIALSLGLTPNFKSNFDLAEDAKLQLSKDTYDDDLDNLLAQIGDQYADLFLAAKNLSD
AILLSDILRVNTEITKAPLSASMIKRYDEHHQDLTLLKALVRQQLPEKYKEIFFDQSKNGYA
GYIDGGASQEEFYKFIKPILEKMDGTEELLVKLNREDLLRKQRTFDNGSIPHQIHLGELHAI
LRRQEDFYPFLKDNREKIEKILTFRIPYYVGPLARGNSRFAWMTRKSEETITPWNFEEVVDK
GASAQSFIERMTNFDKNLPNEKVLPKHSLLYEYFTVYNELTKVKYVTEGMRKPAFLSGEQKK
AIVDLLFKTNRKVTVKQLKEDYFKKIECFDSVEISGVEDRFNASLGTYHDLLKIIKDKDFLD
NEENEDILEDIVLTLTLFEDREMIEERLKTYAHLFDDKVMKQLKRRRYTGWGRLSRKLINGI
RDKQSGKTILDFLKSDGFANRNFMQLIHDDSLTFKEDIQKAQVSGQGDSLHEHIANLAGSPA
IKKGILQTVKVVDELVKVMGRHKPENIVIEMARENQTTQKGQKNSRERMKRIEEGIKELGSQ
ILKEHPVENTQLQNEKLYLYYLQNGRDMYVDQELDINRLSDYDVDHIVPQSFLKDDSIDNKV
LTRSDKNRGKSDNVPSEEVVKKMKNYWRQLLNAKLITQRKFDNLTKAERGGLSELDKAGFIK
RQLVETRQITKHVAQILDSRMNTKYDENDKLIREVKVITLKSKLVSDFRKDFQFYKVREINN
YHHAHDAYLNAVVGTALIKKYPKLESEFVYGDYKVYDVRKMIAKSEQEIGKATAKYFFYSNI
MNFFKTEITLANGEIRKRPLIETNGETGEIVWDKGRDFATVRKVLSMPQVNIVKKTEVQTGG
FSKESILPKRNSDKLIARKKDWDPKKYGGFVSPTVAYSVLVVAKVEKGKSKKLKSVKELLGI
TIMERSSFEKNPIDFLEAKGYKEVKKDLIIKLPKYSLFELENGRKRMLASARELQKGNELAL
PSKYVNFLYLASHYEKLKGSPEDNEQKQLFVEQHKHYLDEIIEQISEFSKRVILADANLDKV
LSAYNKHRDKPIREQAENIIHLFTLTNLGAPAAFKYFDTTIDRKQYRSTKEVLDATLIHQSI
TGLYETRIDLSQLGGDEGADKRTADGSEFESPKKKRKV
09. monoABE8.1_bpNLS + Y147R_Q154R_I76Y
MSEVEFSHEYWMRHALTLAKRARDEREVPVGAVLVLNNRVIGEGWNRAIGLHDPTAHAEIMA
LRQGGLVMQNYRLYDATLYVTFEPCVMCAGAMIHSRIGRVVFGVRNAKTGAAGSLMDVLHYP
GMNHRVEITEGILADECAALLCRFFRMPRRVFNAQKKAQSSTDSGGSSGGSSGSETPGTSES
ATPESSGGSSGGSDKKYSIGLAIGTNSVGWAVITDEYKVPSKKFKVLGNTDRHSIKKNLIGA
LLFDSGETAEATRLKRTARRRYTRRKNRICYLQEIFSNEMAKVDDSFFHRLEESFLVEEDKK
HERHPIFGNIVDEVAYHEKYPTIYHLRKKLVDSTDKADLRLIYLALAHMIKFRGHFLIEGDL
NPDNSDVDKLFIQLVQTYNQLFEENPINASGVDAKAILSARLSKSRRLENLIAQLPGEKKNG
LFGNLIALSLGLTPNFKSNFDLAEDAKLQLSKDTYDDDLDNLLAQIGDQYADLFLAAKNLSD
AILLSDILRVNTEITKAPLSASMIKRYDEHHQDLTLLKALVRQQLPEKYKEIFFDQSKNGYA
GYIDGGASQEEFYKFIKPILEKMDGTEELLVKLNREDLLRKQRTFDNGSIPHQIHLGELHAI
LRRQEDFYPFLKDNREKIEKILTFRIPYYVGPLARGNSRFAWMTRKSEETITPWNFEEVVDK
GASAQSFIERMTNFDKNLPNEKVLPKHSLLYEYFTVYNELTKVKYVTEGMRKPAFLSGEQKK
AIVDLLFKTNRKVTVKQLKEDYFKKIECFDSVEISGVEDRFNASLGTYHDLLKIIKDKDFLD
NEENEDILEDIVLTLTLFEDREMIEERLKTYAHLFDDKVMKQLKRRRYTGWGRLSRKLINGI
RDKQSGKTILDFLKSDGFANRNFMQLIHDDSLTFKEDIQKAQVSGQGDSLHEHIANLAGSPA
IKKGILQTVKVVDELVKVMGRHKPENIVIEMARENQTTQKGQKNSRERMKRIEEGIKELGSQ
ILKEHPVENTQLQNEKLYLYYLQNGRDMYVDQELDINRLSDYDVDHIVPQSFLKDDSIDNKV
LTRSDKNRGKSDNVPSEEVVKKMKNYWRQLLNAKLITQRKFDNLTKAERGGLSELDKAGFIK
RQLVETRQITKHVAQILDSRMNTKYDENDKLIREVKVITLKSKLVSDFRKDFQFYKVREINN
YHHAHDAYLNAVVGTALIKKYPKLESEFVYGDYKVYDVRKMIAKSEQEIGKATAKYFFYSNI
MNFFKTEITLANGEIRKRPLIETNGETGEIVWDKGRDFATVRKVLSMPQVNIVKKTEVQTGG
FSKESILPKRNSDKLIARKKDWDPKKYGGFVSPTVAYSVLVVAKVEKGKSKKLKSVKELLGI
TIMERSSFEKNPIDFLEAKGYKEVKKDLIIKLPKYSLFELENGRKRMLASARELQKGNELAL
PSKYVNFLYLASHYEKLKGSPEDNEQKQLFVEQHKHYLDEIIEQISEFSKRVILADANLDKV
LSAYNKHRDKPIREQAENIIHLFTLTNLGAPAAFKYFDTTIDRKQYRSTKEVLDATLIHQSI
TGLYETRIDLSQLGGDEGADKRTADGSEFESPKKKRKV
10. monoABE8.1_bpNLS + Y147R_Q154R_T166R
MSEVEFSHEYWMRHALTLAKRARDEREVPVGAVLVLNNRVIGEGWNRAIGLHDPTAHAEIMA
LRQGGLVMQNYRLIDATLYVTFEPCVMCAGAMIHSRIGRVVFGVRNAKTGAAGSLMDVLHYP
GMNHRVEITEGILADECAALLCRFFRMPRRVFNAQKKAQSSRDSGGSSGGSSGSETPGTSES
ATPESSGGSSGGSDKKYSIGLAIGTNSVGWAVITDEYKVPSKKFKVLGNTDRHSIKKNLIGA
LLFDSGETAEATRLKRTARRRYTRRKNRICYLQEIFSNEMAKVDDSFFHRLEESFLVEEDKK
HERHPIFGNIVDEVAYHEKYPTIYHLRKKLVDSTDKADLRLIYLALAHMIKFRGHFLIEGDL
NPDNSDVDKLFIQLVQTYNQLFEENPINASGVDAKAILSARLSKSRRLENLIAQLPGEKKNG
LFGNLIALSLGLTPNFKSNFDLAEDAKLQLSKDTYDDDLDNLLAQIGDQYADLFLAAKNLSD
AILLSDILRVNTEITKAPLSASMIKRYDEHHQDLTLLKALVRQQLPEKYKEIFFDQSKNGYA
GYIDGGASQEEFYKFIKPILEKMDGTEELLVKLNREDLLRKQRTFDNGSIPHQIHLGELHAI
LRRQEDFYPFLKDNREKIEKILTFRIPYYVGPLARGNSRFAWMTRKSEETITPWNFEEVVDK
GASAQSFIERMTNFDKNLPNEKVLPKHSLLYEYFTVYNELTKVKYVTEGMRKPAFLSGEQKK
AIVDLLFKTNRKVTVKQLKEDYFKKIECFDSVEISGVEDRFNASLGTYHDLLKIIKDKDFLD
NEENEDILEDIVLTLTLFEDREMIEERLKTYAHLFDDKVMKQLKRRRYTGWGRLSRKLINGI
RDKQSGKTILDFLKSDGFANRNFMQLIHDDSLTFKEDIQKAQVSGQGDSLHEHIANLAGSPA
IKKGILQTVKVVDELVKVMGRHKPENIVIEMARENQTTQKGQKNSRERMKRIEEGIKELGSQ
ILKEHPVENTQLQNEKLYLYYLQNGRDMYVDQELDINRLSDYDVDHIVPQSFLKDDSIDNKV
LTRSDKNRGKSDNVPSEEVVKKMKNYWRQLLNAKLITQRKFDNLTKAERGGLSELDKAGFIK
RQLVETRQITKHVAQILDSRMNTKYDENDKLIREVKVITLKSKLVSDFRKDFQFYKVREINN
YHHAHDAYLNAVVGTALIKKYPKLESEFVYGDYKVYDVRKMIAKSEQEIGKATAKYFFYSNI
MNFFKTEITLANGEIRKRPLIETNGETGEIVWDKGRDFATVRKVLSMPQVNIVKKTEVQTGG
FSKESILPKRNSDKLIARKKDWDPKKYGGFVSPTVAYSVLVVAKVEKGKSKKLKSVKELLGI
TIMERSSFEKNPIDFLEAKGYKEVKKDLIIKLPKYSLFELENGRKRMLASARELQKGNELAL
PSKYVNFLYLASHYEKLKGSPEDNEQKQLFVEQHKHYLDEIIEQISEFSKRVILADANLDKV
LSAYNKHRDKPIREQAENIIHLFTLTNLGAPAAFKYFDTTIDRKQYRSTKEVLDATLIHQSI
TGLYETRIDLSQLGGDEGADKRTADGSEFESPKKKRKV
11. monoABE8.1_bpNLS + Y147T_Q154R
MSEVEFSHEYWMRHALTLAKRARDEREVPVGAVLVLNNRVIGEGWNRAIGLHDPTAHAEIMA
LRQGGLVMQNYRLIDATLYVTFEPCVMCAGAMIHSRIGRVVFGVRNAKTGAAGSLMDVLHYP
GMNHRVEITEGILADECAALLCIFFRMPRRVFNAQKKAQSSTDSGGSSGGSSGSETPGTSES
ATPESSGGSSGGSDKKYSIGLAIGTNSVGWAVITDEYKVPSKKFKVLGNTDRHSIKKNLIGA
LLFDSGETAEATRLKRTARRRYTRRKNRICYLQEIFSNEMAKVDDSFFHRLEESFLVEEDKK
HERHPIFGNIVDEVAYHEKYPTIYHLRKKLVDSTDKADLRLIYLALAHMIKFRGHFLIEGDL
NPDNSDVDKLFIQLVQTYNQLFEENPINASGVDAKAILSARLSKSRRLENLIAQLPGEKKNG
LFGNLIALSLGLTPNFKSNFDLAEDAKLQLSKDTYDDDLDNLLAQIGDQYADLFLAAKNLSD
AILLSDILRVNTEITKAPLSASMIKRYDEHHQDLTLLKALVRQQLPEKYKEIFFDQSKNGYA
GYIDGGASQEEFYKFIKPILEKMDGTEELLVKLNREDLLRKQRTFDNGSIPHQIHLGELHAI
LRRQEDFYPFLKDNREKIEKILTFRIPYYVGPLARGNSRFAWMTRKSEETITPWNFEEVVDK
GASAQSFIERMTNFDKNLPNEKVLPKHSLLYEYFTVYNELTKVKYVTEGMRKPAFLSGEQKK
AIVDLLFKTNRKVTVKQLKEDYFKKIECFDSVEISGVEDRFNASLGTYHDLLKIIKDKDFLD
NEENEDILEDIVLTLTLFEDREMIEERLKTYAHLFDDKVMKQLKRRRYTGWGRLSRKLINGI
RDKQSGKTILDFLKSDGFANRNFMQLIHDDSLTFKEDIQKAQVSGQGDSLHEHIANLAGSPA
IKKGILQTVKVVDELVKVMGRHKPENIVIEMARENQTTQKGQKNSRERMKRIEEGIKELGSQ
ILKEHPVENTQLQNEKLYLYYLQNGRDMYVDQELDINRLSDYDVDHIVPQSFLKDDSIDNKV
LTRSDKNRGKSDNVPSEEVVKKMKNYWRQLLNAKLITQRKFDNLTKAERGGLSELDKAGFIK
RQLVETRQITKHVAQILDSRMNTKYDENDKLIREVKVITLKSKLVSDFRKDFQFYKVREINN
YHHAHDAYLNAVVGTALIKKYPKLESEFVYGDYKVYDVRKMIAKSEQEIGKATAKYFFYSNI
MNFFKTEITLANGEIRKRPLIETNGETGEIVWDKGRDFATVRKVLSMPQVNIVKKTEVQTGG
FSKESILPKRNSDKLIARKKDWDPKKYGGFVSPTVAYSVLVVAKVEKGKSKKLKSVKELLGI
TIMERSSFEKNPIDFLEAKGYKEVKKDLIIKLPKYSLFELENGRKRMLASARELQKGNELAL
PSKYVNFLYLASHYEKLKGSPEDNEQKQLFVEQHKHYLDEIIEQISEFSKRVILADANLDKV
LSAYNKHRDKPIREQAENIIHLFTLTNLGAPAAFKYFDTTIDRKQYRSTKEVLDATLIHQSI
TGLYETRIDLSQLGGDEGADKRTADGSEFESPKKKRKV
12. monoABE8.1_bpNLS + Y147T_Q1545
MSEVEFSHEYWMRHALTLAKRARDEREVPVGAVLVLNNRVIGEGWNRAIGLHDPTAHAEIMA
LRQGGLVMQNYRLIDATLYVTFEPCVMCAGAMIHSRIGRVVFGVRNAKTGAAGSLMDVLHYP
GMNHRVEITEGILADECAALLCIFFRMPRSVFNAQKKAQSSTDSGGSSGGSSGSETPGTSES
ATPESSGGSSGGSDKKYSIGLAIGTNSVGWAVITDEYKVPSKKFKVLGNTDRHSIKKNLIGA
LLFDSGETAEATRLKRTARRRYTRRKNRICYLQEIFSNEMAKVDDSFFHRLEESFLVEEDKK
HERHPIFGNIVDEVAYHEKYPTIYHLRKKLVDSTDKADLRLIYLALAHMIKFRGHFLIEGDL
NPDNSDVDKLFIQLVQTYNQLFEENPINASGVDAKAILSARLSKSRRLENLIAQLPGEKKNG
LFGNLIALSLGLTPNFKSNFDLAEDAKLQLSKDTYDDDLDNLLAQIGDQYADLFLAAKNLSD
AILLSDILRVNTEITKAPLSASMIKRYDEHHQDLTLLKALVRQQLPEKYKEIFFDQSKNGYA
GYIDGGASQEEFYKFIKPILEKMDGTEELLVKLNREDLLRKQRTFDNGSIPHQIHLGELHAI
LRRQEDFYPFLKDNREKIEKILTFRIPYYVGPLARGNSRFAWMTRKSEETITPWNFEEVVDK
GASAQSFIERMTNFDKNLPNEKVLPKHSLLYEYFTVYNELTKVKYVTEGMRKPAFLSGEQKK
AIVDLLFKTNRKVTVKQLKEDYFKKIECFDSVEISGVEDRFNASLGTYHDLLKIIKDKDFLD
NEENEDILEDIVLTLTLFEDREMIEERLKTYAHLFDDKVMKQLKRRRYTGWGRLSRKLINGI
RDKQSGKTILDFLKSDGFANRNFMQLIHDDSLTFKEDIQKAQVSGQGDSLHEHIANLAGSPA
IKKGILQTVKVVDELVKVMGRHKPENIVIEMARENQTTQKGQKNSRERMKRIEEGIKELGSQ
ILKEHPVENTQLQNEKLYLYYLQNGRDMYVDQELDINRLSDYDVDHIVPQSFLKDDSIDNKV
LTRSDKNRGKSDNVPSEEVVKKMKNYWRQLLNAKLITQRKFDNLTKAERGGLSELDKAGFIK
RQLVETRQITKHVAQILDSRMNTKYDENDKLIREVKVITLKSKLVSDFRKDFQFYKVREINN
YHHAHDAYLNAVVGTALIKKYPKLESEFVYGDYKVYDVRKMIAKSEQEIGKATAKYFFYSNI
MNFFKTEITLANGEIRKRPLIETNGETGEIVWDKGRDFATVRKVLSMPQVNIVKKTEVQTGG
FSKESILPKRNSDKLIARKKDWDPKKYGGFVSPTVAYSVLVVAKVEKGKSKKLKSVKELLGI
TIMERSSFEKNPIDFLEAKGYKEVKKDLIIKLPKYSLFELENGRKRMLASARELQKGNELAL
PSKYVNFLYLASHYEKLKGSPEDNEQKQLFVEQHKHYLDEIIEQISEFSKRVILADANLDKV
LSAYNKHRDKPIREQAENIIHLFTLTNLGAPAAFKYFDTTIDRKQYRSTKEVLDATLIHQSI
TGLYETRIDLSQLGGDEGADKRTADGSEFESPKKKRKV
13. monoABE8.1_bpNLS + H123Y123H_Y147R_Q154R_I76Y
MSEVEFSHEYWMRHALTLAKRARDEREVPVGAVLVLNNRVIGEGWNRAIGLHDPTAHAEIMA
LRQGGLVMQNYRLYDATLYVTFEPCVMCAGAMIHSRIGRVVFGVRNAKTGAAGSLMDVLHHP
GMNHRVEITEGILADECAALLCRFFRMPRRVFNAQKKAQSSTDSGGSSGGSSGSETPGTSES
ATPESSGGSSGGSDKKYSIGLAIGTNSVGWAVITDEYKVPSKKFKVLGNTDRHSIKKNLIGA
LLFDSGETAEATRLKRTARRRYTRRKNRICYLQEIFSNEMAKVDDSFFHRLEESFLVEEDKK
HERHPIFGNIVDEVAYHEKYPTIYHLRKKLVDSTDKADLRLIYLALAHMIKFRGHFLIEGDL
NPDNSDVDKLFIQLVQTYNQLFEENPINASGVDAKAILSARLSKSRRLENLIAQLPGEKKNG
LFGNLIALSLGLTPNFKSNFDLAEDAKLQLSKDTYDDDLDNLLAQIGDQYADLFLAAKNLSD
AILLSDILRVNTEITKAPLSASMIKRYDEHHQDLTLLKALVRQQLPEKYKEIFFDQSKNGYA
GYIDGGASQEEFYKFIKPILEKMDGTEELLVKLNREDLLRKQRTFDNGSIPHQIHLGELHAI
LRRQEDFYPFLKDNREKIEKILTFRIPYYVGPLARGNSRFAWMTRKSEETITPWNFEEVVDK
GASAQSFIERMTNFDKNLPNEKVLPKHSLLYEYFTVYNELTKVKYVTEGMRKPAFLSGEQKK
AIVDLLFKTNRKVTVKQLKEDYFKKIECFDSVEISGVEDRFNASLGTYHDLLKIIKDKDFLD
NEENEDILEDIVLTLTLFEDREMIEERLKTYAHLFDDKVMKQLKRRRYTGWGRLSRKLINGI
RDKQSGKTILDFLKSDGFANRNFMQLIHDDSLTFKEDIQKAQVSGQGDSLHEHIANLAGSPA
IKKGILQTVKVVDELVKVMGRHKPENIVIEMARENQTTQKGQKNSRERMKRIEEGIKELGSQ
ILKEHPVENTQLQNEKLYLYYLQNGRDMYVDQELDINRLSDYDVDHIVPQSFLKDDSIDNKV
LTRSDKNRGKSDNVPSEEVVKKMKNYWRQLLNAKLITQRKFDNLTKAERGGLSELDKAGFIK
RQLVETRQITKHVAQILDSRMNTKYDENDKLIREVKVITLKSKLVSDFRKDFQFYKVREINN
YHHAHDAYLNAVVGTALIKKYPKLESEFVYGDYKVYDVRKMIAKSEQEIGKATAKYFFYSNI
MNFFKTEITLANGEIRKRPLIETNGETGEIVWDKGRDFATVRKVLSMPQVNIVKKTEVQTGG
FSKESILPKRNSDKLIARKKDWDPKKYGGFVSPTVAYSVLVVAKVEKGKSKKLKSVKELLGI
TIMERSSFEKNPIDFLEAKGYKEVKKDLIIKLPKYSLFELENGRKRMLASARELQKGNELAL
PSKYVNFLYLASHYEKLKGSPEDNEQKQLFVEQHKHYLDEIIEQISEFSKRVILADANLDKV
LSAYNKHRDKPIREQAENIIHLFTLTNLGAPAAFKYFDTTIDRKQYRSTKEVLDATLIHQSI
TGLYETRIDLSQLGGDEGADKRTADGSEFESPKKKRKV
14. monoABE8.1_bpNLS + V82S + Q154R
MSEVEFSHEYWMRHALTLAKRARDEREVPVGAVLVLNNRVIGEGWNRAIGLHDPTAHAEIMA
LRQGGLVMQNYRLIDATLYSTFEPCVMCAGAMIHSRIGRVVFGVRNAKTGAAGSLMDVLHYP
GMNHRVEITEGILADECAALLCYFFRMPRRVFNAQKKAQSSTDSGGSSGGSSGSETPGTSES
ATPESSGGSSGGSDKKYSIGLAIGTNSVGWAVITDEYKVPSKKFKVLGNTDRHSIKKNLIGA
LLFDSGETAEATRLKRTARRRYTRRKNRICYLQEIFSNEMAKVDDSFFHRLEESFLVEEDKK
HERHPIFGNIVDEVAYHEKYPTIYHLRKKLVDSTDKADLRLIYLALAHMIKFRGHFLIEGDL
NPDNSDVDKLFIQLVQTYNQLFEENPINASGVDAKAILSARLSKSRRLENLIAQLPGEKKNG
LFGNLIALSLGLTPNFKSNFDLAEDAKLQLSKDTYDDDLDNLLAQIGDQYADLFLAAKNLSD
AILLSDILRVNTEITKAPLSASMIKRYDEHHQDLTLLKALVRQQLPEKYKEIFFDQSKNGYA
GYIDGGASQEEFYKFIKPILEKMDGTEELLVKLNREDLLRKQRTFDNGSIPHQIHLGELHAI
LRRQEDFYPFLKDNREKIEKILTFRIPYYVGPLARGNSRFAWMTRKSEETITPWNFEEVVDK
GASAQSFIERMTNFDKNLPNEKVLPKHSLLYEYFTVYNELTKVKYVTEGMRKPAFLSGEQKK
AIVDLLFKTNRKVTVKQLKEDYFKKIECFDSVEISGVEDRFNASLGTYHDLLKIIKDKDFLD
NEENEDILEDIVLTLTLFEDREMIEERLKTYAHLFDDKVMKQLKRRRYTGWGRLSRKLINGI
RDKQSGKTILDFLKSDGFANRNFMQLIHDDSLTFKEDIQKAQVSGQGDSLHEHIANLAGSPA
IKKGILQTVKVVDELVKVMGRHKPENIVIEMARENQTTQKGQKNSRERMKRIEEGIKELGSQ
ILKEHPVENTQLQNEKLYLYYLQNGRDMYVDQELDINRLSDYDVDHIVPQSFLKDDSIDNKV
LTRSDKNRGKSDNVPSEEVVKKMKNYWRQLLNAKLITQRKFDNLTKAERGGLSELDKAGFIK
RQLVETRQITKHVAQILDSRMNTKYDENDKLIREVKVITLKSKLVSDFRKDFQFYKVREINN
YHHAHDAYLNAVVGTALIKKYPKLESEFVYGDYKVYDVRKMIAKSEQEIGKATAKYFFYSNI
MNFFKTEITLANGEIRKRPLIETNGETGEIVWDKGRDFATVRKVLSMPQVNIVKKTEVQTGG
FSKESILPKRNSDKLIARKKDWDPKKYGGFVSPTVAYSVLVVAKVEKGKSKKLKSVKELLGI
TIMERSSFEKNPIDFLEAKGYKEVKKDLIIKLPKYSLFELENGRKRMLASARELQKGNELAL
PSKYVNFLYLASHYEKLKGSPEDNEQKQLFVEQHKHYLDEIIEQISEFSKRVILADANLDKV
LSAYNKHRDKPIREQAENIIHLFTLTNLGAPAAFKYFDTTIDRKQYRSTKEVLDATLIHQSI
TGLYETRIDLSQLGGDEGADKRTADGSEFESPKKKRKV

[0620] In some embodiments, the base editor further comprises a domain comprising all or a portion of a uracil glycosylase inhibitor (UGI). In some embodiments, the base editor comprises a domain comprising all or a portion of a uracil binding protein (UBP), such as a uracil DNA glycosylase (UDG). In some embodiments, the base editor comprises a domain comprising all or a portion of a nucleic acid polymerase. In some embodiments, a nucleic acid polymerase or portion thereof incorporated into a base editor is a translesion DNA polymerase.

[0621] In some embodiments, a domain of the base editor can comprise multiple domains. For example, the base editor comprising a polynucleotide programmable nucleotide binding domain derived from Cas9 can comprise an REC lobe and an NUC lobe corresponding to the REC lobe and NUC lobe of a wild-type or natural Cas9. In another example, the base editor can comprise one or more of a RuvCI domain, BH domain, REC1 domain, REC2 domain, RuvCII domain, L1 domain, HNH domain, L2 domain, RuvCIII domain, WED domain, TOPO domain or CTD domain. In some embodiments, one or more domains of the base editor comprise a mutation (e.g., substitution, insertion, deletion) relative to a wild type version of a polypeptide comprising the domain. For example, an HNH domain of a polynucleotide programmable DNA binding domain can comprise an H840A substitution. In another example, a RuvCI domain of a polynucleotide programmable DNA binding domain can comprise a D10A substitution.

[0622] Different domains (e.g., adjacent domains) of the base editor disclosed herein can be connected to each other with or without the use of one or more linker domains (e.g., an XTEN linker domain). In some embodiments, a linker domain can be a bond (e.g., covalent bond), chemical group, or a molecule linking two molecules or moieties, e.g., two domains of a fusion protein, such as, for example, a first domain (e.g., Cas9-derived domain) and a second domain (e.g., an adenosine deaminase domain or a cytidine deaminase domain). In some embodiments, a linker is a covalent bond (e.g., a carbon-carbon bond, disulfide bond, carbon-hetero atom bond, etc.). In certain embodiments, a linker is a carbon nitrogen bond of an amide linkage. In certain embodiments, a linker is a cyclic or acyclic, substituted or unsubstituted, branched or unbranched aliphatic or heteroaliphatic linker. In certain embodiments, a linker is polymeric (e.g., polyethylene, polyethylene glycol, polyamide, polyester, etc.). In certain embodiments, a linker comprises a monomer, dimer, or polymer of aminoalkanoic acid. In some embodiments, a linker comprises an aminoalkanoic acid (e.g., glycine, ethanoic acid, alanine, beta-alanine, 3-aminopropanoic acid, 4-aminobutanoic acid, 5-pentanoic acid, etc.). In some embodiments, a linker comprises a monomer, dimer, or polymer of aminohexanoic acid (Ahx). In certain embodiments, a linker is based on a carbocyclic moiety (e.g., cyclopentane, cyclohexane). In other embodiments, a linker comprises a polyethylene glycol moiety (PEG). In certain embodiments, a linker comprises an aryl or heteroaryl moiety. In certain embodiments, the linker is based on a phenyl ring. A linker can include functionalized moieties to facilitate attachment of a nucleophile (e.g., thiol, amino) from the peptide to the linker. Any electrophile can be used as part of the linker. Exemplary electrophiles include, but are not limited to, activated esters, activated amides, Michael acceptors, alkyl halides, aryl halides, acyl halides, and isothiocyanates. In some embodiments, a linker joins a gRNA binding domain of an RNA-programmable nuclease, including a Cas9 nuclease domain, and the catalytic domain of a nucleic acid editing protein. In some embodiments, a linker joins a dCas9 and a second domain (e.g., UGI, cytidine deaminase, etc.).

[0623] Typically, a linker is positioned between, or flanked by, two groups, molecules, or other moieties and connected to each one via a covalent bond, thus connecting the two. In some embodiments, a linker is an amino acid or a plurality of amino acids (e.g., a peptide or protein). In some embodiments, a linker is an organic molecule, group, polymer, or chemical moiety. In some embodiments, a linker is 2-100 amino acids in length, for example, 2, 3, 4, 5, 6, 7, 8, 9, 10, 11, 12, 13, 14, 15, 16, 17, 18, 19, 20, 21, 22, 23, 24, 25, 26, 27, 28, 29, 30, 30-35, 35-40, 40-45, 45-50, 50-60, 60-70, 70-80, 80-90, 90-100, 100-150, or 150-200 amino acids in length. In some embodiments, the linker is about 3 to about 104 (e.g., 5, 6, 7, 8, 9, 10, 11, 12, 13, 14, 15, 16, 17, 18, 19, 20, 21, 22, 23, 24, 25, 26, 27, 28, 29, 30, 31, 32, 33, 34, 35, 36, 37, 38, 39, 40, 41, 42, 43, 44, 45, 46, 47, 48, 49, 50, 55, 60, 65, 70, 75, 80, 85, 90, 95, or 100) amino acids in length. Longer or shorter linkers are also contemplated. In some embodiments, a linker domain comprises the amino acid sequence SGSETPGTSESATPES, which can also be referred to as the XTEN linker. Any method for linking the fusion protein domains can be employed (e.g., ranging from very flexible linkers of the form (SGGS)n, (GGGS)n, (GGGGS)n, and (G)n, to more rigid linkers of the form (EAAAK)n, (GGS)n, SGSETPGTSESATPES (see, e.g., Guilinger J P, Thompson D B, Liu D R. Fusion of catalytically inactive Cas9 to FokI nuclease improves the specificity of genome modification. Nat. Biotechnol. 2014; 32(6): 577-82; the entire contents are incorporated herein by reference), or (XP)n motif, in order to achieve the optimal length for activity for the nucleobase editor. In some embodiments, n is 1, 2, 3, 4, 5, 6, 7, 8, 9, 10, 11, 12, 13, 14, or 15. In some embodiments, the linker comprises a (GGS)n motif, wherein n is 1, 3, or 7. In some embodiments, the Cas9 domain of the fusion proteins provided herein are fused via a linker comprising the amino acid sequence SGSETPGTSESATPES. In some embodiments, a linker comprises a plurality of proline residues and is 5-21, 5-14, 5-9, 5-7 amino acids in length, e.g., PAPAP, PAPAPA, PAPAPAP, PAPAPAPA, P(AP)4, P(AP)7, P(AP)10 (see, e.g., Tan J, Zhang F, Karcher D, Bock R. Engineering of high-precision base editors for site-specific single nucleotide replacement. Nat Commun. 2019 Jan. 25; 10(1):439; the entire contents are incorporated herein by reference). Such proline-rich linkers are also termed “rigid” linkers.

### Linkers

[0624] In certain embodiments, linkers may be used to link any of the peptides or peptide domains of the invention. The linker may be as simple as a covalent bond, or it may be a polymeric linker many atoms in length. In certain embodiments, the linker is a polypeptide or based on amino acids. In other embodiments, the linker is not peptide-like. In certain embodiments, the linker is a covalent bond (e.g., a carbon-carbon bond, disulfide bond, carbon-heteroatom bond, etc.). In certain embodiments, the linker is a carbon-nitrogen bond of an amide linkage. In certain embodiments, the linker is a cyclic or acyclic, substituted or unsubstituted, branched or unbranched aliphatic or heteroaliphatic linker. In certain embodiments, the linker is polymeric (e.g., polyethylene, polyethylene glycol, polyamide, polyester, etc.). In certain embodiments, the linker comprises a monomer, dimer, or polymer of aminoalkanoic acid. In certain embodiments, the linker comprises an aminoalkanoic acid (e.g., glycine, ethanoic acid, alanine, beta-alanine, 3-aminopropanoic acid, 4-aminobutanoic acid, 5-pentanoic acid, etc.). In certain embodiments, the linker comprises a monomer, dimer, or polymer of aminohexanoic acid (Ahx). In certain embodiments, the linker is based on a carbocyclic moiety (e.g., cyclopentane, cyclohexane). In other embodiments, the linker comprises a polyethylene glycol moiety (PEG). In other embodiments, the linker comprises amino acids. In certain embodiments, the linker comprises a peptide. In certain embodiments, the linker comprises an aryl or heteroaryl moiety. In certain embodiments, the linker is based on a phenyl ring. The linker may include functionalized moieties to facilitate attachment of a nucleophile (e.g., thiol, amino) from the peptide to the linker. Any electrophile may be used as part of the linker. Exemplary electrophiles include, but are not limited to, activated esters, activated amides, Michael acceptors, alkyl halides, aryl halides, acyl halides, and isothiocyanates.

[0625] In some embodiments, the linker is an amino acid or a plurality of amino acids (e.g., a peptide or protein). In some embodiments, the linker is a bond (e.g., a covalent bond), an organic molecule, group, polymer, or chemical moiety. In some embodiments, the linker is about 3 to about 104 (e.g., 5, 6, 7, 8, 9, 10, 11, 12, 13, 14, 15, 16, 17, 18, 19, 20, 21, 22, 23, 24, 25, 26, 27, 28, 29, 30, 31, 32, 33, 34, 35, 36, 37, 38, 39, 40, 41, 42, 43, 44, 45, 46, 47, 48, 49, 50, 55, 60, 65, 70, 75, 80, 85, 90, 95, or 100) amino acids in length.

[0626] In some embodiments, the cytidine deaminase and adenosine deaminase and the napDNAbp are fused via a linker that is 4, 16, 32, or 104 amino acids in length. In some embodiments, the linker is about 3 to about 104 amino acids in length. In some embodiments, any of the fusion proteins provided herein, comprise a cytidine deaminase, adenosine deaminase and a Cas9 domain that are fused to each other via a linker. Various linker lengths and flexibilities between the deaminase domain (e.g., an engineered ecTadA) and the Cas9 domain can be employed (e.g., ranging from very flexible linkers of the form (GGGS)ₙ, (GGGGS)ₙ, and (G)ₙ to more rigid linkers of the form (EAAAK)ₙ, (SGGS)ₙ, SGSETPGTSESATPES (see, e.g., Guilinger J P, Thompson D B, Liu D R. Fusion of catalytically inactive Cas9 to FokI nuclease improves the specificity of genome modification. Nat. Biotechnol. 2014; 32(6): 577-82; the entire contents are incorporated herein by reference) and (XP)ₙ) in order to achieve the optimal length for activity for the nucleobase editor. In some embodiments, n is 1, 2, 3, 4, 5, 6, 7, 8, 9, 10, 11, 12, 13, 14, or 15. In some embodiments, the linker comprises a (GGS)ₙ motif, wherein n is 1, 3, or 7. In some embodiments, the cytidine deaminase and adenosine deaminase and the Cas9 domain of any of the fusion proteins provided herein are fused via a linker (e.g., an XTEN linker) comprising the amino acid sequence SGSETPGTSESATPES.

[0627] In some embodiments, the target region comprises a target window, wherein the target window comprises the target nucleobase pair. In some embodiments, the target window comprises 1-10 nucleotides. In some embodiments, the target window is 1, 2, 3, 4, 5, 6, 7, 8, 9, 10, 11, 12, 13, 14, 15, 16, 17, 18, 19, or 20 nucleotides in length. In some embodiments, the intended edit of base pair is within the target window. In some embodiments, the target window comprises the intended edit of base pair. In some embodiments, the method is performed using any of the base editors provided herein. In some embodiments, a target window is a deamination window.

[0628] Additionally, in some cases, a Gam protein can be fused to an N terminus of a base editor. In some cases, a Gam protein can be fused to a C-terminus of a base editor. The Gam protein of bacteriophage Mu can bind to the ends of double strand breaks (DSBs) and protect them from degradation. In some embodiments, using Gam to bind the free ends of DSB can reduce indel formation during the process of base editing. In some embodiments, 174-residue Gam protein is fused to the N terminus of the base editors. See. Komor, A. C., et al., “Improved base excision repair inhibition and bacteriophage Mu Gam protein yields C:G-to-T:A base editors with higher efficiency and product purity” Science Advances 3:eaao4774 (2017). In some cases, a mutation or mutations can change the length of a base editor domain relative to a wild type domain. For example, a deletion of at least one amino acid in at least one domain can reduce the length of the base editor. In another case, a mutation or mutations do not change the length of a domain relative to a wild type domain. For example, substitution(s) in any domain does/do not change the length of the base editor.

[0629] In some embodiments, the base editing fusion proteins provided herein need to be positioned at a precise location, for example, where a target base is placed within a defined region (e.g., a “deamination window”). In some cases, a target can be within a 4 base region. In some cases, such a defined target region can be approximately 15 bases upstream of the PAM. See Komor, A. C., et al., “Programmable editing of a target base in genomic DNA without double-stranded DNA cleavage” Nature 533, 420-424 (2016); Gaudelli, N. M., et al., “Programmable base editing of A·T to G·C in genomic DNA without DNA cleavage” Nature 551, 464-471 (2017); and Komor, A. C., et al., “Improved base excision repair inhibition and bacteriophage Mu Gam protein yields C:G-to-T:A base editors with higher efficiency and product purity” Science Advances 3:eaao4774 (2017), the entire contents of which are hereby incorporated by reference.

[0630] A defined target region can be a deamination window. A deamination window can be the defined region in which a base editor acts upon and deaminates a target nucleotide. In some embodiments, the deamination window is within a 2, 3, 4, 5, 6, 7, 8, 9, or 10 base regions. In some embodiments, the deamination window is 5, 6, 7, 8, 9, 10, 11, 12, 13, 14, 15, 16, 17, 18, 19, 20, 21, 22, 23, 24, or 25 bases upstream of the PAM.

[0631] The base editors of the present disclosure can comprise any domain, feature or amino acid sequence which facilitates the editing of a target polynucleotide sequence. For example, in some embodiments, the base editor comprises a nuclear localization sequence (NLS). In some embodiments, an NLS of the base editor is localized between a deaminase domain and a polynucleotide programmable nucleotide binding domain. In some embodiments, an NLS of the base editor is localized C-terminal to a polynucleotide programmable nucleotide binding domain.

[0632] Other exemplary features that can be present in a base editor as disclosed herein are localization sequences, such as cytoplasmic localization sequences, export sequences, such as nuclear export sequences, or other localization sequences, as well as sequence tags that are useful for solubilization, purification, or detection of the fusion proteins. Suitable protein tags provided herein include, but are not limited to, biotin carboxylase carrier protein (BCCP) tags, myc-tags, calmodulin-tags, FLAG-tags, hemagglutinin (HA)-tags, polyhistidine tags, also referred to as histidine tags or His-tags, maltose binding protein (MBP)-tags, nus-tags, glutathione-S-transferase (GST)-tags, green fluorescent protein (GFP)-tags, thioredoxin-tags, S-tags, Softags (e.g., Softag 1, Softag 3), strep-tags, biotin ligase tags, FlAsH tags, V5 tags, and SBP-tags. Additional suitable sequences will be apparent to those of skill in the art. In some embodiments, the fusion protein comprises one or more His tags.

[0633] Non-limiting examples of protein domains which can be included in the fusion protein include deaminase domains (e.g., cytidine deaminase, adenosine deaminase), a uracil glycosylase inhibitor (UGI) domain, epitope tags, and reporter gene sequences.

[0634] Non-limiting examples of epitope tags include histidine (His) tags, V5 tags, FLAG tags, influenza hemagglutinin (HA) tags, Myc tags, VSV-G tags, and thioredoxin (Trx) tags. Examples of reporter genes include, but are not limited to, glutathione-5-transferase (GST), horseradish peroxidase (HRP), chloramphenicol acetyltransferase (CAT) beta-galactosidase, beta-glucuronidase, luciferase, green fluorescent protein (GFP), HcRed, DsRed, cyan fluorescent protein (CFP), yellow fluorescent protein (YFP), and autofluorescent proteins including blue fluorescent protein (BFP). Additional protein sequences can include amino acid sequences that bind DNA molecules or bind other cellular molecules, including, but not limited to, maltose binding protein (MBP), S-tag, Lex A DNA binding domain (DBD) fusions, GAL4 DNA binding domain fusions, and herpes simplex virus (HSV) BP16 protein fusions.

### Base Editor Efficiency

[0635] CRISPR-Cas9 nucleases have been widely used to mediate targeted genome editing. In most genome editing applications, Cas9 forms a complex with a guide polynucleotide (e.g., single guide RNA (sgRNA)) and induces a double-stranded DNA break (DSB) at the target site specified by the sgRNA sequence. Cells primarily respond to this DSB through the non-homologous end-joining (NHEJ) repair pathway, which results in stochastic insertions or deletions (indels) that can cause frameshift mutations that disrupt the gene. In the presence of a donor DNA template with a high degree of homology to the sequences flanking the DSB, gene alteration can be achieved through an alternative pathway known as homology directed repair (HDR). Unfortunately, under most non-perturbative conditions, HDR is inefficient, dependent on cell state and cell type, and dominated by a larger frequency of indels. Base editing systems as provided herein provide a new way to provide genome editing without generating double-strand DNA breaks, without requiring a donor DNA template, and without inducing an excess of stochastic insertions and deletions.

[0636] The base editors provided herein are capable of modifying a specific nucleotide base without generating a significant proportion of indels. The term “indel(s)”, as used herein, refers to the insertion or deletion of a nucleotide base within a nucleic acid. Such insertions or deletions can lead to frame shift mutations within a coding region of a gene. In some embodiments, it is desirable to generate base editors that efficiently modify (e.g., mutate or deaminate) a specific nucleotide within a nucleic acid, without generating a large number of insertions or deletions (i.e., indels) in the target nucleotide sequence. In certain embodiments, any of the base editors provided herein are capable of generating a greater proportion of intended modifications (e.g., point mutations or deaminations) versus indels. In some embodiments, any of base editor systems provided herein result in less than 50%, less than 40%, less than 30%, less than 20%, less than 19%, less than 18%, less than 17%, less than 16%, less than 15%, less than 14%, less than 13%, less than 12%, less than 11%, less than 10%, less than 9%, less than 8%, less than 7%, less than 6%, less than 5%, less than 4%, less than 3%, less than 2%, less than 1%, less than 0.9%, less than 0.8%, less than 0.7%, less than 0.6%, less than 0.5%, less than 0.4%, less than 0.3%, less than 0.2%, less than 0.1%, less than 0.09%, less than 0.08%, less than 0.07%, less than 0.06%, less than 0.05%, less than 0.04%, less than 0.03%, less than 0.02%, or less than 0.01% indel formation in the target polynucleotide sequence.

[0637] In some embodiments, any of base editor systems comprising one of the ABE8 base editor variants described herein result in less than 50%, less than 40%, less than 30%, less than 20%, less than 19%, less than 18%, less than 17%, less than 16%, less than 15%, less than 14%, less than 13%, less than 12%, less than 11%, less than 10%, less than 9%, less than 8%, less than 7%, less than 6%, less than 5%, less than 4%, less than 3%, less than 2%, less than 1%, less than 0.9%, less than 0.8%, less than 0.7%, less than 0.6%, less than 0.5%, less than 0.4%, less than 0.3%, less than 0.2%, less than 0.1%, less than 0.09%, less than 0.08%, less than 0.07%, less than 0.06%, less than 0.05%, less than 0.04%, less than 0.03%, less than 0.02%, or less than 0.01% indel formation in the target polynucleotide sequence.

[0638] In some embodiments, any of base editor systems comprising one of the ABE8 base editor variants described herein result in less than 0.8% indel formation in the target polynucleotide sequence. In some embodiments, any of base editor systems comprising one of the ABE8 base editor variants described herein result in at most 0.8% indel formation in the target polynucleotide sequence. In some embodiments, any of base editor systems comprising one of the ABE8 base editor variants described herein result in less than 0.3% indel formation in the target polynucleotide sequence. In some embodiments, any of base editor systems comprising one of the ABE8 base editor variants described results in lower indel formation in the target polynucleotide sequence compared to a base editor system comprising one of ABE7 base editors. In some embodiments, any of base editor systems comprising one of the ABE8 base editor variants described herein results in lower indel formation in the target polynucleotide sequence compared to a base editor system comprising an ABE7.10.

[0639] In some embodiments, any of base editor systems comprising one of the ABE8 base editor variants described herein has reduction in indel frequency compared to a base editor system comprising one of the ABE7 base editors. In some embodiments, any of base editor systems comprising one of the ABE8 base editor variants described herein has at least 0.01%, at least 1%, at least 2%, at least 3%, at least 4%, at least 5%, at least 10%, at least 15%, at least 20%, at least 25%, at least 30%, at least 35%, at least 40%, at least 45%, at least 50%, at least 55%, at least 60%, at least 65%, at least 70%, at least 75%, at least 80%, at least 85%, at least 90%, or at least 95% reduction in indel frequency compared to a base editor system comprising one of the ABE7 base editors. In some embodiments, a base editor system comprising one of the ABE8 base editor variants described herein has at least 0.01%, at least 1%, at least 2%, at least 3%, at least 4%, at least 5%, at least 10%, at least 15%, at least 20%, at least 25%, at least 30%, at least 35%, at least 40%, at least 45%, at least 50%, at least 55%, at least 60%, at least 65%, at least 70%, at least 75%, at least 80%, at least 85%, at least 90%, or at least 95% reduction in indel frequency compared to a base editor system comprising an ABE7.10.

[0640] The disclosure provides adenosine deaminase variants (e.g., ABE8 variants) that have increased efficiency and specificity. In particular, the adenosine deaminase variants described herein are more likely to edit a desired base within a polynucleotide, and are less likely to edit bases that are not intended to be altered (e.g., “bystanders”).

[0641] In some embodiments, any of the base editing system comprising one of the ABE8 base editor variants described herein has reduced bystander editing or mutations. In some embodiments, an unintended editing or mutation is a bystander mutation or bystander editing, for example, base editing of a target base (e.g., A or C) in an unintended or non-target position in a target window of a target nucleotide sequence. In some embodiments, any of the base editing system comprising one of the ABE8 base editor variants described herein has reduced bystander editing or mutations compared to a base editor system comprising an ABE7 base editor, e.g., ABE7.10. In some embodiments, any of the base editing system comprising one of the ABE8 base editor variants described herein has reduced bystander editing or mutations by at least 1%, at least 2%, at least 3%, at least 4%, at least 5%, at least 10%, at least 15%, at least 20%, at least 25%, at least 30%, at least 35%, at least 40%, at least 45%, at least 50%, at least 55%, at least 60%, at least 65%, at least 70%, at least 75%, at least 80%, at least 85%, at least 90%, at least 95%, or at least 99% compared to a base editor system comprising an ABE7 base editor, e.g., ABE7.10. In some embodiments, any of the base editing system comprising one of the ABE8 base editor variants described herein has reduced bystander editing or mutations by at least 1.1 fold, at least 1.2 fold, at least 1.3 fold, at least 1.4 fold, at least 1.5 fold, at least 1.6 fold, at least 1.7 fold, at least 1.8 fold, at least 1.9 fold, at least 2.0 fold, at least 2.1 fold, at least 2.2 fold, at least 2.3 fold, at least 2.4 fold, at least 2.5 fold, at least 2.6 fold, at least 2.7 fold, at least 2.8 fold, at least 2.9 fold, or at least 3.0 fold compared to a base editor system comprising an ABE7 base editor, e.g., ABE7.10.

[0642] In some embodiments, any of the base editing system comprising one of the ABE8 base editor variants described herein has reduced spurious editing. In some embodiments, an unintended editing or mutation is a spurious mutation or spurious editing, for example, non-specific editing or guide independent editing of a target base (e.g., A or C) in an unintended or non-target region of the genome. In some embodiments, any of the base editing system comprising one of the ABE8 base editor variants described herein has reduced spurious editing compared to a base editor system comprising an ABE7 base editor, e.g., ABE7.10. In some embodiments, any of the base editing system comprising one of the ABE8 base editor variants described herein has reduced spurious editing by at least 1%, at least 2%, at least 3%, at least 4%, at least 5%, at least 10%, at least 15%, at least 20%, at least 25%, at least 30%, at least 35%, at least 40%, at least 45%, at least 50%, at least 55%, at least 60%, at least 65%, at least 70%, at least 75%, at least 80%, at least 85%, at least 90%, at least 95%, or at least 99% compared to a base editor system comprising an ABE7 base editor, e.g., ABE7.10. In some embodiments, any of the base editing system comprising one of the ABE8 base editor variants described herein has reduced spurious editing by at least 1.1 fold, at least 1.2 fold, at least 1.3 fold, at least 1.4 fold, at least 1.5 fold, at least 1.6 fold, at least 1.7 fold, at least 1.8 fold, at least 1.9 fold, at least 2.0 fold, at least 2.1 fold, at least 2.2 fold, at least 2.3 fold, at least 2.4 fold, at least 2.5 fold, at least 2.6 fold, at least 2.7 fold, at least 2.8 fold, at least 2.9 fold, or at least 3.0 fold compared to a base editor system comprising an ABE7 base editor, e.g., ABE7.10.

[0643] Some aspects of the disclosure are based on the recognition that any of the base editors provided herein are capable of efficiently generating an intended mutation, such as a point mutation, in a nucleic acid (e.g., a nucleic acid within a genome of a subject) without generating a significant number of unintended mutations, such as unintended point mutations (i.e., mutation of bystanders). In some embodiments, any of the base editors provided herein are capable of generating at least 0.01% of intended mutations (i.e. at least 0.01% base editing efficiency). In some embodiments, any of the base editors provided herein are capable of generating at least 0.01%, 1, 2%, 3%, 4%, 5%10%, 15%, 20%, 25%, 30%, 40%, 45%, 50%, 60%, 70%, 80%, 90%, 95%, or 99% of intended mutations.

[0644] In some embodiments, any of the ABE8 base editor variants described herein have at least 0.01%, at least 1%, at least 2%, at least 3%, at least 4%, at least 5%, at least 10%, at least 15%, at least 20%, at least 25%, at least 30%, at least 35%, at least 40%, at least 45%, at least 50%, at least 55%, at least 60%, at least 65%, at least 70%, at least 75%, at least 80%, at least 85%, at least 90%, at least 95%, or at least 99% base editing efficiency. In some embodiments, the base editing efficiency may be measured by calculating the percentage of edited nucleobases in a population of cells. In some embodiments, any of the ABE8 base editor variants described herein have base editing efficiency of at least 0.01%, at least 1%, at least 2%, at least 3%, at least 4%, at least 5%, at least 10%, at least 15%, at least 20%, at least 25%, at least 30%, at least 35%, at least 40%, at least 45%, at least 50%, at least 55%, at least 60%, at least 65%, at least 70%, at least 75%, at least 80%, at least 85%, at least 90%, at least 95%, or at least 99% as measured by edited nucleobases in a population of cells.

[0645] In some embodiments, any of the ABE8 base editor variants described herein has higher base editing efficiency compared to the ABE7 base editors. In some embodiments, any of the ABE8 base editor variants described herein have at least 1%, at least 2%, at least 3%, at least 4%, at least 5%, at least 10%, at least 15%, at least 20%, at least 25%, at least 30%, at least 35%, at least 40%, at least 45%, at least 50%, at least 55%, at least 60%, at least 65%, at least 70%, at least 75%, at least 80%, at least 85%, at least 90%, at least 95%, at least 99%, at least 100%, at least 105%, at least 110%, at least 115%, at least 120%, at least 125%, at least 130%, at least 135%, at least 140%, at least 145%, at least 150%, at least 155%, at least 160%, at least 165%, at least 170%, at least 175%, at least 180%, at least 185%, at least 190%, at least 195%, at least 200%, at least 210%, at least 220%, at least 230%, at least 240%, at least 250%, at least 260%, at least 270%, at least 280%, at least 290%, at least 300%, at least 310%, at least 320%, at least 330%, at least 340%, at least 350%, at least 360%, at least 370%, at least 380%, at least 390%, at least 400%, at least 450%, or at least 500% higher base editing efficiency compared to an ABE7 base editor, e.g., ABE7.10.

[0646] In some embodiments, any of the ABE8 base editor variants described herein has at least 1.1 fold, at least 1.2 fold, at least 1.3 fold, at least 1.4 fold, at least 1.5 fold, at least 1.6 fold, at least 1.7 fold, at least 1.8 fold, at least 1.9 fold, at least 2.0 fold, at least 2.1 fold, at least 2.2 fold, at least 2.3 fold, at least 2.4 fold, at least 2.5 fold, at least 2.6 fold, at least 2.7 fold, at least 2.8 fold, at least 2.9 fold, at least 3.0 fold, at least 3.1 fold, at least 3.2, at least 3.3 fold, at least 3.4 fold, at least 3.5 fold, at least 3.6 fold, at least 3.7 fold, at least 3.8 fold, at least 3.9 fold, at least 4.0 fold, at least 4.1 fold, at least 4.2 fold, at least 4.3 fold, at least 4.4 fold, at least 4.5 fold, at least 4.6 fold, at least 4.7 fold, at least 4.8 fold, at least 4.9 fold, or at least 5.0 fold higher base editing efficiency compared to an ABE7 base editor, e.g., ABE7.10.

[0647] In some embodiments, any of the ABE8 base editor variants described herein have at least 0.01%, at least 1%, at least 2%, at least 3%, at least 4%, at least 5%, at least 10%, at least 15%, at least 20%, at least 25%, at least 30%, at least 35%, at least 40%, at least 45%, at least 50%, at least 55%, at least 60%, at least 65%, at least 70%, at least 75%, at least 80%, at least 85%, at least 90%, at least 95%, or at least 99% on-target base editing efficiency. In some embodiments, any of the ABE8 base editor variants described herein have on-target base editing efficiency of at least 0.01%, at least 1%, at least 2%, at least 3%, at least 4%, at least 5%, at least 10%, at least 15%, at least 20%, at least 25%, at least 30%, at least 35%, at least 40%, at least 45%, at least 50%, at least 55%, at least 60%, at least 65%, at least 70%, at least 75%, at least 80%, at least 85%, at least 90%, at least 95%, or at least 99% as measured by edited target nucleobases in a population of cells.

[0648] In some embodiments, any of the ABE8 base editor variants described herein has higher on-target base editing efficiency compared to the ABE7 base editors. In some embodiments, any of the ABE8 base editor variants described herein have at least 1%, at least 2%, at least 3%, at least 4%, at least 5%, at least 10%, at least 15%, at least 20%, at least 25%, at least 30%, at least 35%, at least 40%, at least 45%, at least 50%, at least 55%, at least 60%, at least 65%, at least 70%, at least 75%, at least 80%, at least 85%, at least 90%, at least 95%, at least 99%, at least 100%, at least 105%, at least 110%, at least 115%, at least 120%, at least 125%, at least 130%, at least 135%, at least 140%, at least 145%, at least 150%, at least 155%, at least 160%, at least 165%, at least 170%, at least 175%, at least 180%, at least 185%, at least 190%, at least 195%, at least 200%, at least 210%, at least 220%, at least 230%, at least 240%, at least 250%, at least 260%, at least 270%, at least 280%, at least 290%, at least 300%, at least 310%, at least 320%, at least 330%, at least 340%, at least 350%, at least 360%, at least 370%, at least 380%, at least 390%, at least 400%, at least 450%, or at least 500% higher on-target base editing efficiency compared to an ABE7 base editor, e.g., ABE7.10.

[0649] In some embodiments, any of the ABE8 base editor variants described herein has at least 1.1 fold, at least 1.2 fold, at least 1.3 fold, at least 1.4 fold, at least 1.5 fold, at least 1.6 fold, at least 1.7 fold, at least 1.8 fold, at least 1.9 fold, at least 2.0 fold, at least 2.1 fold, at least 2.2 fold, at least 2.3 fold, at least 2.4 fold, at least 2.5 fold, at least 2.6 fold, at least 2.7 fold, at least 2.8 fold, at least 2.9 fold, at least 3.0 fold, at least 3.1 fold, at least 3.2 fold, at least 3.3 fold, at least 3.4 fold, at least 3.5 fold, at least 3.6 fold, at least 3.7 fold, at least 3.8 fold, at least 3.9 fold, at least 4.0 fold, at least 4.1 fold, at least 4.2 fold, at least 4.3 fold, at least 4.4 fold, at least 4.5 fold, at least 4.6 fold, at least 4.7 fold, at least 4.8 fold, at least 4.9 fold, or at least 5.0 fold higher on-target base editing efficiency compared to an ABE7 base editor, e.g., ABE7.10.

[0650] The ABE8 base editor variants described herein may be delivered to a host cell via a plasmid, a vector, a LNP complex, or an mRNA. In some embodiments, any of the ABE8 base editor variants described herein is delivered to a host cell as an mRNA. In some embodiments, an ABE8 base editor delivered via a nucleic acid based delivery system, e.g., an mRNA, has on-target editing efficiency of at least at least 1%, at least 2%, at least 3%, at least 4%, at least 5%, at least 10%, at least 15%, at least 20%, at least 25%, at least 30%, at least 35%, at least 40%, at least 45%, at least 50%, at least 55%, at least 60%, at least 65%, at least 70%, at least 75%, at least 80%, at least 85%, at least 90%, at least 95%, or at least 99% as measured by edited nucleobases. In some embodiments, an ABE8 base editor delivered by an mRNA system has higher base editing efficiency compared to an ABE8 base editor delivered by a plasmid or vector system. In some embodiments, any of the ABE8 base editor variants described herein has at least 1%, at least 2%, at least 3%, at least 4%, at least 5%, at least 10%, at least 15%, at least 20%, at least 25%, at least 30%, at least 35%, at least 40%, at least 45%, at least 50%, at least 55%, at least 60%, at least 65%, at least 70%, at least 75%, at least 80%, at least 85%, at least 90%, at least 95%, at least 99%, at least 100%, at least 105%, at least 110%, at least 115%, at least 120%, at least 125%, at least 130%, at least 135%, at least 140%, at least 145%, at least 150%, at least 155%, at least 160%, at least 165%, at least 170%, at least 175%, at least 180%, at least 185%, at least 190%, at least 195%, at least 200%, at least 210%, at least 220%, at least 230%, at least 240%, at least 250%, at least 260%, at least 270%, at least 280%, at least 290%, at least 300% higher, at least 310%, at least 320%, at least 330%, at least 340%, at least 350%, at least 360%, at least 370%, at least 380%, at least 390%, at least 400%, at least 450%, or at least 500% on-target editing efficiency when delivered by an mRNA system compared to when delivered by a plasmid or vector system. In some embodiments, any of the ABE8 base editor variants described herein has at least 1.1 fold, at least 1.2 fold, at least 1.3 fold, at least 1.4 fold, at least 1.5 fold, at least 1.6 fold, at least 1.7 fold, at least 1.8 fold, at least 1.9 fold, at least 2.0 fold, at least 2.1 fold, at least 2.2 fold, at least 2.3 fold, at least 2.4 fold, at least 2.5 fold, at least 2.6 fold, at least 2.7 fold, at least 2.8 fold, at least 2.9 fold, at least 3.0 fold, at least 3.1 fold, at least 3.2 fold, at least 3.3 fold, at least 3.4 fold, at least 3.5 fold, at least 3.6 fold, at least 3.7 fold, at least 3.8 fold, at least 3.9 fold, at least 4.0 fold, at least 4.1 fold, at least 4.2 fold, at least 4.3 fold, at least 4.4 fold, at least 4.5 fold, at least 4.6 fold, at least 4.7 fold, at least 4.8 fold, at least 4.9 fold, or at least 5.0 fold higher on-target editing efficiency when delivered by an mRNA system compared to when delivered by a plasmid or vector system.

[0651] In some embodiments, any of base editor systems comprising one of the ABE8 base editor variants described herein result in less than 50%, less than 40%, less than 30%, less than 20%, less than 19%, less than 18%, less than 17%, less than 16%, less than 15%, less than 14%, less than 13%, less than 12%, less than 11%, less than 10%, less than 9%, less than 8%, less than 7%, less than 6%, less than 5%, less than 4%, less than 3%, less than 2%, less than 1%, less than 0.9%, less than 0.8%, less than 0.7%, less than 0.6%, less than 0.5%, less than 0.4%, less than 0.3%, less than 0.2%, less than 0.1%, less than 0.09%, less than 0.08%, less than 0.07%, less than 0.06%, less than 0.05%, less than 0.04%, less than 0.03%, less than 0.02%, or less than 0.01% off-target editing in the target polynucleotide sequence.

[0652] In some embodiments, any of the ABE8 base editor variants described herein has lower guided off-target editing efficiency when delivered by an mRNA system compared to when delivered by a plasmid or vector system. In some embodiments, any of the ABE8 base editor variants described herein has at least 1%, at least 2%, at least 3%, at least 4%, at least 5%, at least 10%, at least 15%, at least 20%, at least 25%, at least 30%, at least 35%, at least 40%, at least 45%, at least 50%, at least 55%, at least 60%, at least 65%, at least 70%, at least 75%, at least 80%, at least 85%, at least 90%, at least 95%, or at least 99% lower guided off-target editing efficiency when delivered by an mRNA system compared to when delivered by a plasmid or vector system. In some embodiments, any of the ABE8 base editor variants described herein has at least 1.1 fold, at least 1.2 fold, at least 1.3 fold, at least 1.4 fold, at least 1.5 fold, at least 1.6 fold, at least 1.7 fold, at least 1.8 fold, at least 1.9 fold, at least 2.0 fold, at least 2.1 fold, at least 2.2 fold, at least 2.3 fold, at least 2.4 fold, at least 2.5 fold, at least 2.6 fold, at least 2.7 fold, at least 2.8 fold, at least 2.9 fold, or at least 3.0 fold lower guided off-target editing efficiency when delivered by an mRNA system compared to when delivered by a plasmid or vector system. In some embodiments, any of the ABE8 base editor variants described herein has at least about 2.2 fold decrease in guided off-target editing efficiency when delivered by an mRNA system compared to when delivered by a plasmid or vector system.

[0653] In some embodiments, any of the ABE8 base editor variants described herein has lower guide-independent off-target editing efficiency when delivered by an mRNA system compared to when delivered by a plasmid or vector system. In some embodiments, any of the ABE8 base editor variants described herein has at least 1%, at least 2%, at least 3%, at least 4%, at least 5%, at least 10%, at least 15%, at least 20%, at least 25%, at least 30%, at least 35%, at least 40%, at least 45%, at least 50%, at least 55%, at least 60%, at least 65%, at least 70%, at least 75%, at least 80%, at least 85%, at least 90%, at least 95%, or at least 99% lower guide-independent off-target editing efficiency when delivered by an mRNA system compared to when delivered by a plasmid or vector system. In some embodiments, any of the ABE8 base editor variants described herein has at least 1.1 fold, at least 1.2 fold, at least 1.3 fold, at least 1.4 fold, at least 1.5 fold, at least 1.6 fold, at least 1.7 fold, at least 1.8 fold, at least 1.9 fold, at least 2.0 fold, at least 2.1 fold, at least 2.2 fold, at least 2.3 fold, at least 2.4 fold, at least 2.5 fold, at least 2.6 fold, at least 2.7 fold, at least 2.8 fold, at least 2.9 fold, at least 3.0 fold, at least 5.0 fold, at least 10.0 fold, at least 20.0 fold, at least 50.0 fold, at least 70.0 fold, at least 100.0 fold, at least 120.0 fold, at least 130.0 fold, or at least 150.0 fold lower guide-independent off-target editing efficiency when delivered by an mRNA system compared to when delivered by a plasmid or vector system. In some embodiments, ABE8 base editor variants described herein has 134.0 fold decrease in guide-independent off-target editing efficiency (e.g., spurious RNA deamination) when delivered by an mRNA system compared to when delivered by a plasmid or vector system. In some embodiments, ABE8 base editor variants described herein does not increase guide-independent mutation rates across the genome.

[0654] Some aspects of the disclosure are based on the recognition that any of the base editors provided herein are capable of efficiently generating an intended mutation, such as a point mutation, in a nucleic acid (e.g., a nucleic acid within a genome of a subject) without generating a significant number of unintended mutations, such as unintended point mutations. In some embodiments, any of the base editors provided herein are capable of generating at least 0.01% of intended mutations (e.g., spurious off-target editing or bystander editing). In some embodiments, an intended mutation is a mutation that is generated by a specific base editor bound to a gRNA, specifically designed to alter or correct a mutation in a target gene. Some aspects of the disclosure are based on the recognition that any of the base editors provided herein are capable of efficiently generating an intended mutation in a nucleic acid (e.g. a nucleic acid within a genome of a subject) without generating a significant number of unintended mutations. In some embodiments, an intended mutation is a mutation that is generated by a specific base editor bound to a gRNA, specifically designed to alter or correct an intended mutation. In some embodiments, the intended mutation is a mutation that generates a stop codon, for example, a premature stop codon within the coding region of a gene. In some embodiments, the intended mutation is a mutation that eliminates a stop codon. In some embodiments, the intended mutation is a mutation that alters the splicing of a gene. In some embodiments, the intended mutation is a mutation that alters the regulatory sequence of a gene (e.g., a gene promotor or gene repressor). In some embodiments, the base editors provided herein are capable of generating a ratio of intended point mutations to indels that is greater than 1:1. In some embodiments, the base editors provided herein are capable of generating a ratio of intended point mutations to indels that is at least 1.5:1, at least 2:1, at least 2.5:1, at least 3:1, at least 3.5:1, at least 4:1, at least 4.5:1, at least 5:1, at least 5.5:1, at least 6:1, at least 6.5:1, at least 7:1, at least 7.5:1, at least 8:1, at least 8.5:1, at least 9:1, at least 10:1, at least 11:1, at least 12:1, at least 13:1, at least 14:1, at least 15:1, at least 20:1, at least 25:1, at least 30:1, at least 40:1, at least 50:1, at least 100:1, at least 200:1, at least 300:1, at least 400:1, at least 500:1, at least 600:1, at least 700:1, at least 800:1, at least 900:1, or at least 1000:1, or more.

[0655] The number of intended mutations and indels can be determined using any suitable method, for example, as described in International PCT Application Nos. PCT/2017/045381 (WO2018/027078) and PCT/US2016/058344 (WO2017/070632); Komor, A. C., et al., “Programmable editing of a target base in genomic DNA without double-stranded DNA cleavage” Nature 533, 420-424 (2016); Gaudelli, N. M., et al., “Programmable base editing of A·T to G·C in genomic DNA without DNA cleavage” Nature 551, 464-471 (2017); and Komor, A. C., et al., “Improved base excision repair inhibition and bacteriophage Mu Gam protein yields C:G-to-T:A base editors with higher efficiency and product purity” Science Advances 3:eaao4774 (2017); the entire contents of which are hereby incorporated by reference.

[0656] In some embodiments, to calculate indel frequencies, sequencing reads are scanned for exact matches to two 10-bp sequences that flank both sides of a window in which indels can occur. If no exact matches are located, the read is excluded from analysis. If the length of this indel window exactly matches the reference sequence the read is classified as not containing an indel. If the indel window is two or more bases longer or shorter than the reference sequence, then the sequencing read is classified as an insertion or deletion, respectively. In some embodiments, the base editors provided herein can limit formation of indels in a region of a nucleic acid. In some embodiments, the region is at a nucleotide targeted by a base editor or a region within 2, 3, 4, 5, 6, 7, 8, 9, or 10 nucleotides of a nucleotide targeted by a base editor.

[0657] The number of indels formed at a target nucleotide region can depend on the amount of time a nucleic acid (e.g., a nucleic acid within the genome of a cell) is exposed to a base editor. In some embodiments, the number or proportion of indels is determined after at least 1 hour, at least 2 hours, at least 6 hours, at least 12 hours, at least 24 hours, at least 36 hours, at least 48 hours, at least 3 days, at least 4 days, at least 5 days, at least 7 days, at least 10 days, or at least 14 days of exposing the target nucleotide sequence (e.g., a nucleic acid within the genome of a cell) to a base editor. It should be appreciated that the characteristics of the base editors as described herein can be applied to any of the fusion proteins, or methods of using the fusion proteins provided herein.

[0658] In some embodiments, the base editors provided herein are capable of limiting formation of indels in a region of a nucleic acid. In some embodiments, the region is at a nucleotide targeted by a base editor or a region within 2, 3, 4, 5, 6, 7, 8, 9, or 10 nucleotides of a nucleotide targeted by a base editor. In some embodiments, any of the base editors provided herein are capable of limiting the formation of indels at a region of a nucleic acid to less than 1%, less than 1.5%, less than 2%, less than 2.5%, less than 3%, less than 3.5%, less than 4%, less than 4.5%, less than 5%, less than 6%, less than 7%, less than 8%, less than 9%, less than 10%, less than 12%, less than 15%, or less than 20%. The number of indels formed at a nucleic acid region may depend on the amount of time a nucleic acid (e.g., a nucleic acid within the genome of a cell) is exposed to a base editor. In some embodiments, any number or proportion of indels is determined after at least 1 hour, at least 2 hours, at least 6 hours, at least 12 hours, at least 24 hours, at least 36 hours, at least 48 hours, at least 3 days, at least 4 days, at least 5 days, at least 7 days, at least 10 days, or at least 14 days of exposing a nucleic acid (e.g., a nucleic acid within the genome of a cell) to a base editor.

### Multiplex Editing

[0659] In some embodiments, the base editor system provided herein is capable of multiplex editing of a plurality of nucleobase pairs in one or more genes. In some embodiments, the plurality of nucleobase pairs is located in the same gene. In some embodiments, the plurality of nucleobase pairs is located in one or more gene, wherein at least one gene is located in a different locus. In some embodiments, the multiplex editing can comprise one or more guide polynucleotides. In some embodiments, the multiplex editing can comprise one or more base editor system. In some embodiments, the multiplex editing can comprise one or more base editor systems with a single guide polynucleotide. In some embodiments, the multiplex editing can comprise one or more base editor system with a plurality of guide polynucleotides. In some embodiments, the multiplex editing can comprise one or more guide polynucleotide with a single base editor system. In some embodiments, the multiplex editing can comprise at least one guide polynucleotide that does not require a PAM sequence to target binding to a target polynucleotide sequence. In some embodiments, the multiplex editing can comprise at least one guide polynucleotide that requires a PAM sequence to target binding to a target polynucleotide sequence. In some embodiments, the multiplex editing can comprise a mix of at least one guide polynucleotide that does not require a PAM sequence to target binding to a target polynucleotide sequence and at least one guide polynucleotide that require a PAM sequence to target binding to a target polynucleotide sequence. It should be appreciated that the characteristics of the multiplex editing using any of the base editors as described herein can be applied to any of combination of the methods of using any of the base editor provided herein. It should also be appreciated that the multiplex editing using any of the base editors as described herein can comprise a sequential editing of a plurality of nucleobase pairs.

[0660] In some embodiments, the plurality of nucleobase pairs are in one more genes. In some embodiments, the plurality of nucleobase pairs is in the same gene. In some embodiments, at least one gene in the one more genes is located in a different locus.

[0661] In some embodiments, the editing is editing of the plurality of nucleobase pairs in at least one protein coding region. In some embodiments, the editing is editing of the plurality of nucleobase pairs in at least one protein non-coding region. In some embodiments, the editing is editing of the plurality of nucleobase pairs in at least one protein coding region and at least one protein non-coding region.

[0662] In some embodiments, the editing is in conjunction with one or more guide polynucleotides. In some embodiments, the base editor system can comprise one or more base editor system. In some embodiments, the base editor system can comprise one or more base editor systems in conjunction with a single guide polynucleotide. In some embodiments, the base editor system can comprise one or more base editor system in conjunction with a plurality of guide polynucleotides. In some embodiments, the editing is in conjunction with one or more guide polynucleotide with a single base editor system. In some embodiments, the editing is in conjunction with at least one guide polynucleotide that does not require a PAM sequence to target binding to a target polynucleotide sequence. In some embodiments, the editing is in conjunction with at least one guide polynucleotide that require a PAM sequence to target binding to a target polynucleotide sequence. In some embodiments, the editing is in conjunction with a mix of at least one guide polynucleotide that does not require a PAM sequence to target binding to a target polynucleotide sequence and at least one guide polynucleotide that require a PAM sequence to target binding to a target polynucleotide sequence. It should be appreciated that the characteristics of the multiplex editing using any of the base editors as described herein can be applied to any of combination of the methods of using any of the base editors provided herein. It should also be appreciated that the editing can comprise a sequential editing of a plurality of nucleobase pairs.

### Methods of Using Base Editors

[0663] Editing the HBV genome up new strategies for therapeutics and basic research.

[0664] The present disclosure provides methods for the treatment of a subject diagnosed with HBV infection. For example, in some embodiments, a method is provided that comprises administering to a subject having such a disease, e.g., a disease caused by HBV infection, an effective amount of a nucleobase editor (e.g., an adenosine deaminase base editor or a cytidine deaminase base editor) that alters a nucleobase in the HBV genome.

[0665] In a certain aspect, methods are provided for the treatment of HBV infection, which can be treated by deaminase mediated gene editing of at least one of the HBV genes.

[0666] It will be understood that the numbering of the specific positions or residues in the respective sequences, e.g., polynucleotide or amino acid sequences of a disease-related gene or its encoded protein, respectively, depends on the particular protein and numbering scheme used. Numbering can be different, e.g., in precursors of a mature protein and the mature protein itself, and differences in sequences from species to species can affect numbering. One of skill in the art will be able to identify the respective residue in any homologous protein and in the respective encoding nucleic acid by methods well known in the art, e.g., by sequence alignment and determination of homologous residues.

[0667] Provided herein are methods of using the base editor or base editor system for editing a nucleobase in a target nucleotide sequence in the HBV genome. In some embodiments, the activity of the base editor (e.g., comprising an adenosine deaminase and a Cas9 domain) results in an alteration of a nucleobase in the HBV genome. In some embodiments, the target DNA sequence is altered to comprise a G→A point mutation, and wherein the deamination of the A base results in a sequence that reduces or eliminates HBV function. In some embodiments, the target DNA sequence is altered to comprise a T→C point mutation, and wherein the deamination of the mutant C base results in a sequence that reduces or eliminates HBV function.

[0668] In some embodiments, the target DNA sequence encodes a protein (e.g., an HBV protein such as a polymerase or a surface antigen), and the alteration results in a change in the amino acid encoded by the wildtype codon. In some embodiments, the deamination of an A nucleotide results in a change of the amino acid encoded by the wildtype codon. In some embodiments, the deamination of the wildtype A results in the codon encoding a mutant amino acid. In some embodiments, the deamination of the wildtype C results in a change of the amino acid encoded by the wildtype codon. In some embodiments, the deamination of the wildtype C results in the codon encoding a mutant amino acid. In some embodiments, the subject has or has been diagnosed with HBV infection.

[0669] In some embodiments, the adenosine deaminases provided herein are capable of deaminating adenine of a deoxyadenosine residue of DNA. Other aspects of the disclosure provide fusion proteins that comprise an adenosine deaminase (e.g., an adenosine deaminase that deaminates deoxyadenosine in DNA as described herein) and a domain (e.g., a Cas9 or a Cpf1 protein) capable of binding to a specific nucleotide sequence. For example, the adenosine can be converted to an inosine residue, which typically base pairs with a cytosine residue. Such fusion proteins are useful inter alia for targeted editing of nucleic acid sequences. Such fusion proteins can be used for targeted editing of HBV DNA in vitro; for the introduction of targeted mutations, e.g., for the alteration of the HBV genome in cells ex vivo; and for the introduction of targeted mutations in vivo, e.g., the alteration of the HBV genome in cells in a subject infected with HBV. The present disclosure provides deaminases, fusion proteins, nucleic acids, vectors, cells, compositions, methods, kits, systems, etc. that utilize the deaminases and nucleobase editors.

### Generating an Intended Mutation

[0670] The nucleobase editing proteins provided herein can be validated for gene editing-based human therapeutics in vitro, e.g., by introducing alterations in the HBV genome that reduce or eliminate the infection or symptoms thereof. It will be understood by the skilled artisan that the nucleobase editing proteins provided herein, e.g., the fusion proteins comprising a polynucleotide programmable nucleotide binding domain (e.g., Cas9) and a nucleobase editing domain (e.g., an adenosine deaminase domain or a cytidine deaminase domain) can be used to alter any A to G or C to T. In the first case, deamination of the A to I alters the HBV genome sequence, and in the latter case, deamination of the A that is base-paired with a T in the HBV genome, followed by a round of replication, introduces the mutation.

[0671] In some embodiments, the present disclosure provides base editors that can efficiently generating an intended mutation in a nucleic acid (e.g., a nucleic acid within a genome of a subject) without generating a significant number of unintended mutations, such as unintended point mutations in a subject's genome. In some embodiments, an intended mutation is a mutation that is generated by a specific base editor (e.g., cytidine base editor or adenosine base editor) bound to a guide polynucleotide (e.g., gRNA), specifically designed to generate the intended mutation. In some embodiments, the intended mutation is an adenine (A) to guanine (G) point mutation. In some embodiments, the intended mutation is a cytosine (C) to thymine (T) point mutation. In some embodiments, the intended mutation is an adenine (A) to guanine (G) point mutation within the coding region or non-coding region of a gene. In some embodiments, the intended mutation is a cytosine (C) to thymine (T) point mutation within the coding region or non-coding region of a gene. In some embodiments, the intended mutation is a point mutation that generates a stop codon, for example, a premature stop codon within the coding region of a gene. In some embodiments, the intended mutation is a mutation that eliminates a stop codon.

[0672] In some embodiments, any of the base editors provided herein are capable of generating a ratio of intended mutations to unintended mutations (e.g., intended point mutations:unintended point mutations) that is greater than 1:1. In some embodiments, any of the base editors provided herein are capable of generating a ratio of intended mutations to unintended mutations (e.g., intended point mutations:unintended point mutations) that is at least 1.5:1, at least 2:1, at least 2.5:1, at least 3:1, at least 3.5:1, at least 4:1, at least 4.5:1, at least 5:1, at least 5.5:1, at least 6:1, at least 6.5:1, at least 7:1, at least 7.5:1, at least 8:1, at least 10:1, at least 12:1, at least 15:1, at least 20:1, at least 25:1, at least 30:1, at least 40:1, at least 50:1, at least 100:1, at least 150:1, at least 200:1, at least 250:1, at least 500:1, or at least 1000:1, or more

[0673] Details of base editor efficiency are described in International PCT Application Nos. PCT/2017/045381 (WO2018/027078) and PCT/US2016/058344 (WO2017/070632), each of which is incorporated herein by reference for its entirety. Also see Komor, A. C., et al., “Programmable editing of a target base in genomic DNA without double-stranded DNA cleavage” Nature 533, 420-424 (2016); Gaudelli, N. M., et al., “Programmable base editing of A·T to G·C in genomic DNA without DNA cleavage” Nature 551, 464-471 (2017); and Komor, A. C., et al., “Improved base excision repair inhibition and bacteriophage Mu Gam protein yields C:G-to-T:A base editors with higher efficiency and product purity” Science Advances 3:eaao4774 (2017), the entire contents of which are hereby incorporated by reference.

[0674] In some embodiments, the editing of the plurality of nucleobase pairs in one or more genes result in formation of at least one intended mutation. In some embodiments, the formation of the at least one intended mutation results in an alteration of the HBV genome. It should be appreciated that the characteristics of the multiplex editing of the base editors as described herein can be applied to any of combination of the methods of using the base editor provided herein.

### Modification of HBV Genes

[0675] In some embodiments, a precise modification of an HBV gene decreases the virulence of the virus and/or decreases the ability of the virus to propagate in vitro. The modification can be a premature stop codon or other mutation that impairs or otherwise reduces the activity of an HBV protein. In some embodiments, the HBV gene that is targeted for modification is the pol, X, S, pre-S1, pre-S2, or the core of pre-core genes, or a combination thereof.

### Expression of Fusion Proteins in a Host Cell

[0676] Fusion proteins of the disclosure comprising an adenosine deaminase variant may be expressed in virtually any host cell of interest, including but not limited to bacteria, yeast, fungi, insects, plants, and animal cells using routine methods known to the skilled artisan. For example, a DNA encoding an adenosine deaminase of the disclosure can be cloned by designing suitable primers for the upstream and downstream of CDS based on the cDNA sequence. The cloned DNA may be directly, or after digestion with a restriction enzyme when desired, or after addition of a suitable linker and/or a nuclear localization signal ligated with a DNA encoding one or more additional components of a base editing system. The base editing system is translated in a host cell to form a complex.

[0677] A DNA encoding a protein domain described herein can be obtained by chemically synthesizing the DNA, or by connecting synthesized partly overlapping oligoDNA short chains by utilizing the PCR method and the Gibson Assembly method to construct a DNA encoding the full length thereof. The advantage of constructing a full-length DNA by chemical synthesis or a combination of PCR method or Gibson Assembly method is that the codon to be used can be designed in CDS full-length according to the host into which the DNA is introduced. In the expression of a heterologous DNA, the protein expression level is expected to increase by converting the DNA sequence thereof to a codon highly frequently used in the host organism. As the data of codon use frequency in host to be used, for example, the genetic code use frequency database (http://www.kazusa.or.jp/codon/index.html) disclosed in the home page of Kazusa DNA Research Institute can be used, or documents showing the codon use frequency in each host may be referred to. By reference to the obtained data and the DNA sequence to be introduced, codons showing low use frequency in the host from among those used for the DNA sequence may be converted to a codon coding the same amino acid and showing high use frequency.

[0678] An expression vector containing a DNA encoding a nucleic acid sequence-recognizing module and/or a nucleic acid base converting enzyme can be produced, for example, by linking the DNA to the downstream of a promoter in a suitable expression vector.

[0679] When the expression vectors are Escherichia coli-derived plasmids (e.g., pBR322, pBR325, pUC12, pUC13); Bacillus subtilis-derived plasmids (e.g., pUB110, pTP5, pC194); yeast-derived plasmids (e.g., pSH19, pSH15); insect cell expression plasmids (e.g., pFast-Bac); animal cell expression plasmids (e.g., pA1-11, pXT1, pRc/CMV, pRc/RSV, pcDNAI/Neo); bacteriophages such as .lamda.phage and the like; insect virus vectors such as baculovirus and the like (e.g., BmNPV, AcNPV); animal virus vectors such as retrovirus, vaccinia virus, adenovirus and the like are used.

[0680] In some embodiments, any promoter appropriate for a host to be used for gene expression can be used. In a conventional method using DSB, since the survival rate of the host cell sometimes decreases markedly due to the toxicity, it is desirable to increase the number of cells by the start of the induction by using an inductive promoter. However, since sufficient cell proliferation can also be afforded by expressing the nucleic acid-modifying enzyme complex of the present disclosure, a constitution promoter can also be used without limitation.

[0681] For example, when the host is an animal cell, SRα promoter, SV40 promoter, LTR promoter, CMV (cytomegalovirus) promoter, RSV (Rous sarcoma virus) promoter, MoMuLV (Moloney mouse leukemia virus) LTR, HSV-TK (simple herpes virus thymidine kinase) promoter and the like are used. Of these, CMV promoter, SRa promoter and the like are preferable.

[0682] When the host is Escherichia coli, trp promoter, lac promoter, recA promoter, λP_{L} promoter, lpp promoter, T7 promoter and the like are preferable.

[0683] When the host is genus Bacillus, SPO1 promoter, SPO2 promoter, penP promoter and the like are preferable.

[0684] When the host is a yeast, Gall/10 promoter, PHO5 promoter, PGK promoter, GAP promoter, ADH promoter and the like are preferable.

[0685] When the host is an insect cell, polyhedrin promoter, P10 promoter and the like are preferable.

[0686] When the host is a plant cell, CaMV35S promoter, CaMV19S promoter, NOS promoter and the like are preferable.

[0687] As the expression vector, besides those mentioned above, one containing enhancer, splicing signal, terminator, polyA addition signal, a selection marker such as drug resistance gene, auxotrophic complementary gene and the like, replication origin and the like on demand can be used.

[0688] An RNA encoding a protein domain described herein can be prepared by, for example, transcription to mRNA in a vitro transcription system known per se by using a vector encoding DNA encoding the above-mentioned nucleic acid sequence-recognizing module and/or a nucleic acid base converting enzyme as a template.

[0689] A fusion protein of the disclosure can be intracellularly expressed by introducing an expression vector containing a DNA encoding a nucleic acid sequence-recognizing module and/or a nucleic acid base converting enzyme into a host cell, and culturing the host cell.

[0690] As the host, genus Escherichia, genus Bacillus, yeast, insect cell, insect, animal cell and the like are used.

[0691] As the genus Escherichia, Escherichia coli K12.cndot.DH1 (Proc. Natl. Acad. Sci. USA, 60, 160 (1968)), Escherichia coli JM103 (Nucleic Acids Research, 9, 309 (1981)), Escherichia coli JA221 (Journal of Molecular Biology, 120, 517 (1978)), Escherichia coli HB101 (Journal of Molecular Biology, 41, 459 (1969)), Escherichia coli C600 (Genetics, 39, 440 (1954)) and the like are used.

[0692] As the genus Bacillus, Bacillus subtilis M1114 (Gene, 24, 255 (1983)), Bacillus subtilis 207-21 (Journal of Biochemistry, 95, 87 (1984)) and the like are used.

[0693] As the yeast, Saccharomyces cerevisiae AH22, AH22R, NA87-11A, DKD-5D, 20B-12, Schizosaccharomyces pombe NCYC1913, NCYC2036, Pichia pastoris KM71 and the like are used.

[0694] As the insect cell when the virus is AcNPV, cells of cabbage armyworm larva-derived established line (Spodoptera frugiperda cell; Sf cell), MG1 cells derived from the mid-intestine of Trichoplusia ni, High Five™ cells derived from an egg of Trichoplusia ni, Mamestra brassicae-derived cells, Estigmena acrea-derived cells and the like are used. When the virus is BmNPV, cells of Bombyx mori-derived established line (Bombyx mori N cell; BmN cell) and the like are used as insect cells. As the Sf cell, for example, Sf9 cell (ATCC CRL1711), Sf21 cell (all above, In Vivo, 13, 213-217 (1977)) and the like are used.

[0695] As the insect, for example, larva of Bombyx mori, Drosophila, cricket and the like are used (Nature, 315, 592 (1985)).

[0696] As the animal cell, cell lines such as monkey COS-7 cell, monkey Vero cell, Chinese hamster ovary (CHO) cell, dhfr gene-deficient CHO cell, mouse L cell, mouse AtT-20 cell, mouse myeloma cell, rat GH3 cell, human FL cell and the like, pluripotent stem cells such as iPS cell, ES cell and the like of human and other mammals, and primary cultured cells prepared from various tissues are used. Furthermore, zebrafish embryo, Xenopus oocyte and the like can also be used.

[0697] As the plant cell, suspend cultured cells, callus, protoplast, leaf segment, root segment and the like prepared from various plants (e.g., grain such as rice, wheat, corn and the like, product crops such as tomato, cucumber, eggplant and the like, garden plants such as carnation, Eustoma russellianum and the like, experiment plants such as tobacco, Arabidopsis thaliana and the like) are used.

[0698] All the above-mentioned host cells may be haploid (monoploid), or polyploid (e.g., diploid, triploid, tetraploid and the like). In the conventional mutation introduction methods, mutation is, in principle, introduced into only one homologous chromosome to produce a hetero gene type. Therefore, desired phenotype is not expressed unless dominant mutation occurs, and homozygousness inconveniently requires labor and time. In contrast, according to the present disclosure, since mutation can be introduced into any allele on the homologous chromosome in the genome, desired phenotype can be expressed in a single generation even in the case of recessive mutation, which is extremely useful since the problem of the conventional method can be solved.

[0699] An expression vector can be introduced by a known method (e.g., lysozyme method, competent method, PEG method, CaCl₂) coprecipitation method, electroporation method, the microinjection method, the particle gun method, lipofection method, Agrobacterium method and the like) according to the kind of the host.

[0700] Escherichia coli can be transformed according to the methods described in, for example, Proc. Natl. Acad. Sci. USA, 69, 2110 (1972), Gene, 17, 107 (1982) and the like.

[0701] The genus Bacillus can be introduced into a vector according to the methods described in, for example, Molecular & General Genetics, 168, 111 (1979) and the like.

[0702] A yeast can be introduced into a vector according to the methods described in, for example, Methods in Enzymology, 194, 182-187 (1991), Proc. Natl. Acad. Sci. USA, 75, 1929 (1978) and the like.

[0703] An insect cell and an insect can be introduced into a vector according to the methods described in, for example, Bio/Technology, 6, 47-55 (1988) and the like.

[0704] An animal cell can be introduced into a vector according to the methods described in, for example, Cell Engineering additional volume 8, New Cell Engineering Experiment Protocol, 263-267 (1995) (published by Shujunsha), and Virology, 52, 456 (1973).

[0705] A cell introduced with a vector can be cultured according to a known method according to the kind of the host.

[0706] For example, when Escherichia coli or genus Bacillus is cultured, a liquid medium is preferable as a medium to be used for the culture. The medium preferably contains a carbon source, nitrogen source, inorganic substance and the like necessary for the growth of the transformant. Examples of the carbon source include glucose, dextrin, soluble starch, sucrose and the like; examples of the nitrogen source include inorganic or organic substances such as ammonium salts, nitrate salts, corn steep liquor, peptone, casein, meat extract, soybean cake, potato extract and the like; and examples of the inorganic substance include calcium chloride, sodium dihydrogen phosphate, magnesium chloride and the like. The medium may contain yeast extract, vitamins, growth promoting factor and the like. The pH of the medium is preferably about 5 to about 8.

[0707] As a medium for culturing Escherichia coli, for example, M9 medium containing glucose, casamino acid (Journal of Experiments in Molecular Genetics, 431-433, Cold Spring Harbor Laboratory, New York 1972) is preferable. Where necessary, for example, agents such as 3β-indolylacrylic acid may be added to the medium to ensure an efficient function of a promoter. Escherichia coli is cultured at generally about 15 to about 43° C. Where necessary, aeration and stirring may be performed.

[0708] The genus Bacillus is cultured at generally about 30° C. to about 40° C. Where necessary, aeration and stirring may be performed.

[0709] Examples of the medium for culturing yeast include Burkholder minimum medium (Proc. Natl. Acad. Sci. USA, 77, 4505 (1980)), SD medium containing 0.5% casamino acid (Proc. Natl. Acad. Sci. USA, 81, 5330 (1984)) and the like. The pH of the medium is preferably about 5 to about 8. The culture is performed at generally about 20° C. to about 35° C. Where necessary, aeration and stirring may be performed.

[0710] As a medium for culturing an insect cell or insect, for example, Grace's Insect Medium (Nature, 195, 788 (1962)) containing an additive such as inactivated 10% bovine serum and the like as appropriate and the like are used. The pH of the medium is preferably about 6.2 to about 6.4. The culture is performed at generally about 27° C. Where necessary, aeration and stirring may be performed.

[0711] As a medium for culturing an animal cell, for example, minimum essential medium (MEM) containing about 5 to about 20% of fetal bovine serum (Science, 122, 501 (1952)), Dulbecco's modified Eagle medium (DMEM) (Virology, 8, 396 (1959)), RPMI 1640 medium (The Journal of the American Medical Association, 199, 519 (1967)), 199 medium (Proceeding of the Society for the Biological Medicine, 73, 1 (1950)) and the like are used. The pH of the medium is preferably about 6 to about 8. The culture is performed at generally about 30° C. to about 40° C. Where necessary, aeration and stirring may be performed.

[0712] As a medium for culturing a plant cell, for example, MS medium, LS medium, B5 medium and the like are used. The pH of the medium is preferably about 5 to about 8. The culture is performed at generally about 20° C. to about 30° C. Where necessary, aeration and stirring may be performed.

[0713] When a higher eukaryotic cell, such as animal cell, insect cell, plant cell and the like is used as a host cell, a DNA encoding a base editing system of the present disclosure (e.g., comprising an adenosine deaminase variant) is introduced into a host cell under the regulation of an inducible promoter (e.g., metallothionein promoter (induced by heavy metal ion), heat shock protein promoter (induced by heat shock), Tet-ON/Tet-OFF system promoter (induced by addition or removal of tetracycline or a derivative thereof), steroid-responsive promoter (induced by steroid hormone or a derivative thereof) etc.), the induction substance is added to the medium (or removed from the medium) at an appropriate stage to induce expression of the nucleic acid-modifying enzyme complex, culture is performed for a given period to carry out a base editing and, introduction of a mutation into a target gene, transient expression of the base editing system can be realized.

[0714] Prokaryotic cells such as Escherichia coli and the like can utilize an inducible promoter. Examples of the inducible promoter include, but are not limited to, lac promoter (induced by IPTG), cspA promoter (induced by cold shock), araBAD promoter (induced by arabinose) and the like.

Alternatively, the above-mentioned inductive promoter can also be utilized as a vector removal mechanism when higher eukaryotic cells, such as animal cell, insect cell, plant cell and the like are used as a host cell. That is, a vector is mounted with a replication origin that functions in a host cell, and a nucleic acid encoding a protein necessary for replication (e.g., SV40 on and large T antigen, oriP and EBNA-1 etc. for animal cells), of the expression of the nucleic acid encoding the protein is regulated by the above-mentioned inducible promoter. As a result, while the vector is autonomously replicatable in the presence of an induction substance, when the induction substance is removed, autonomous replication is not available, and the vector naturally falls off along with cell division (autonomous replication is not possible by the addition of tetracycline and doxycycline in Tet-OFF system vector).

### Delivery System

[0715] A base editor disclosed herein can be encoded on a nucleic acid that is contained in a viral vector. Viral vectors can include lentivirus, Adenovirus, Retrovirus, and Adeno-associated viruses (AAVs). Viral vectors can be selected based on the application. For example, AAVs are commonly used for gene delivery in vivo due to their mild immunogenicity. Adenoviruses are commonly used as vaccines because of the strong immunogenic response they induce. Packaging capacity of the viral vectors can limit the size of the base editor that can be packaged into the vector. For example, the packaging capacity of the AAVs is ˜4.5 kb including two 145 base inverted terminal repeats (ITRs).

[0716] AAV is a small, single-stranded DNA dependent virus belonging to the parvovirus family. The 4.7 kb wild-type (wt) AAV genome is made up of two genes that encode four replication proteins and three capsid proteins, respectively, and is flanked on either side by 145-bp inverted terminal repeats (ITRs). The virion is composed of three capsid proteins, Vp1, Vp2, and Vp3, produced in a 1:1:10 ratio from the same open reading frame but from differential splicing (Vp1) and alternative translational start sites (Vp2 and Vp3, respectively). Vp3 is the most abundant subunit in the virion and participates in receptor recognition at the cell surface defining the tropism of the virus. A phospholipase domain, which functions in viral infectivity, has been identified in the unique N terminus of Vp1.

[0717] Similar to wt AAV, recombinant AAV (rAAV) utilizes the cis-acting 145-bp ITRs to flank vector transgene cassettes, providing up to 4.5 kb for packaging of foreign DNA. Subsequent to infection, rAAV can express a fusion protein of the invention and persist without integration into the host genome by existing episomally in circular head-to-tail concatemers. Although there are numerous examples of rAAV success using this system, in vitro and in vivo, the limited packaging capacity has limited the use of AAV-mediated gene delivery when the length of the coding sequence of the gene is equal or greater in size than the wt AAV genome.

[0718] The small packaging capacity of AAV vectors makes the delivery of a number of genes that exceed this size and/or the use of large physiological regulatory elements challenging. These challenges can be addressed, for example, by dividing the protein(s) to be delivered into two or more fragments, wherein the N-terminal fragment is fused to a split intein-N and the C-terminal fragment is fused to a split intein-C. These fragments are then packaged into two or more AAV vectors. As used herein, “intein” refers to a self-splicing protein intron (e.g., peptide) that ligates flanking N-terminal and C-terminal exteins (e.g., fragments to be joined). The use of certain inteins for joining heterologous protein fragments is described, for example, in Wood et al., J. Biol. Chem. 289(21); 14512-9 (2014). For example, when fused to separate protein fragments, the inteins IntN and IntC recognize each other, splice themselves out and simultaneously ligate the flanking N- and C-terminal exteins of the protein fragments to which they were fused, thereby reconstituting a full-length protein from the two protein fragments. Other suitable inteins will be apparent to a person of skill in the art.

[0719] A fragment of a fusion protein of the invention can vary in length. In some embodiments, a protein fragment ranges from 2 amino acids to about 1000 amino acids in length. In some embodiments, a protein fragment ranges from about 5 amino acids to about 500 amino acids in length. In some embodiments, a protein fragment ranges from about 20 amino acids to about 200 amino acids in length. In some embodiments, a protein fragment ranges from about 10 amino acids to about 100 amino acids in length. Suitable protein fragments of other lengths will be apparent to a person of skill in the art.

[0720] In some embodiments, a portion or fragment of a nuclease (e.g., Cas9) is fused to an intein. The nuclease can be fused to the N-terminus or the C-terminus of the intein. In some embodiments, a portion or fragment of a fusion protein is fused to an intein and fused to an AAV capsid protein. The intein, nuclease and capsid protein can be fused together in any arrangement (e.g., nuclease-intein-capsid, intein-nuclease-capsid, capsid-intein-nuclease, etc.). In some embodiments, the N-terminus of an intein is fused to the C-terminus of a fusion protein and the C-terminus of the intein is fused to the N-terminus of an AAV capsid protein.

[0721] In one embodiment, dual AAV vectors are generated by splitting a large transgene expression cassette in two separate halves (5′ and 3′ ends, or head and tail), where each half of the cassette is packaged in a single AAV vector (of <5 kb). The re-assembly of the full-length transgene expression cassette is then achieved upon co-infection of the same cell by both dual AAV vectors followed by: (1) homologous recombination (HR) between 5′ and 3′ genomes (dual AAV overlapping vectors); (2) ITR-mediated tail-to-head concatemerization of 5′ and 3′ genomes (dual AAV trans-splicing vectors); or (3) a combination of these two mechanisms (dual AAV hybrid vectors). The use of dual AAV vectors in vivo results in the expression of full-length proteins. The use of the dual AAV vector platform represents an efficient and viable gene transfer strategy for transgenes of >4.7 kb in size.

[0722] The disclosed strategies for designing base editors can be useful for generating base editors capable of being packaged into a viral vector. The use of RNA or DNA viral based systems for the delivery of a base editor takes advantage of highly evolved processes for targeting a virus to specific cells in culture or in the host and trafficking the viral payload to the nucleus or host cell genome. Viral vectors can be administered directly to cells in culture, patients (in vivo), or they can be used to treat cells in vitro, and the modified cells can optionally be administered to patients (ex vivo). Conventional viral based systems could include retroviral, lentivirus, adenoviral, adeno-associated and herpes simplex virus vectors for gene transfer. Integration in the host genome is possible with the retrovirus, lentivirus, and adeno-associated virus gene transfer methods, often resulting in long term expression of the inserted transgene. Additionally, high transduction efficiencies have been observed in many different cell types and target tissues.

[0723] The tropism of a retrovirus can be altered by incorporating foreign envelope proteins, expanding the potential target population of target cells. Lentiviral vectors are retroviral vectors that are able to transduce or infect non-dividing cells and typically produce high viral titers. Selection of a retroviral gene transfer system would therefore depend on the target tissue. Retroviral vectors are comprised of cis-acting long terminal repeats with packaging capacity for up to 6-10 kb of foreign sequence. The minimum cis-acting LTRs are sufficient for replication and packaging of the vectors, which are then used to integrate the therapeutic gene into the target cell to provide permanent transgene expression. Widely used retroviral vectors include those based upon murine leukemia virus (MuLV), gibbon ape leukemia virus (GaLV), Simian Immuno deficiency virus (SIV), human immuno deficiency virus (HIV), and combinations thereof (See, e.g., Buchscher et al., J. Virol. 66:2731-2739 (1992); Johann et al., J. Virol. 66:1635-1640 (1992); Sommnerfelt et al., Virol. 176:58-59 (1990); Wilson et al., J. Virol. 63:2374-2378 (1989); Miller et al., J. Virol. 65:2220-2224 (1991); PCT/US94/05700).

[0724] Retroviral vectors, especially lentiviral vectors, can require polynucleotide sequences smaller than a given length for efficient integration into a target cell. For example, retroviral vectors of length greater than 9 kb can result in low viral titers compared with those of smaller size. In some aspects, a base editor of the present disclosure is of sufficient size so as to enable efficient packaging and delivery into a target cell via a retroviral vector. In some cases, a base editor is of a size so as to allow efficient packing and delivery even when expressed together with a guide nucleic acid and/or other components of a targetable nuclease system.

[0725] In applications where transient expression is preferred, adenoviral based systems can be used. Adenoviral based vectors are capable of very high transduction efficiency in many cell types and do not require cell division. With such vectors, high titer and levels of expression have been obtained. This vector can be produced in large quantities in a relatively simple system. Adeno-associated virus (“AAV”) vectors can also be used to transduce cells with target nucleic acids, e.g., in the in vitro production of nucleic acids and peptides, and for in vivo and ex vivo gene therapy procedures (See, e.g., West et al., Virology 160:38-47 (1987); U.S. Pat. No. 4,797,368; WO 93/24641; Kotin, Human Gene Therapy 5:793-801 (1994); Muzyczka, J. Clin. Invest. 94:1351 (1994). The construction of recombinant AAV vectors is described in a number of publications, including U.S. Pat. No. 5,173,414; Tratschin et al., Mol. Cell. Biol. 5:3251-3260 (1985); Tratschin, et al., Mol. Cell. Biol. 4:2072-2081 (1984); Hermonat & Muzyczka, PNAS 81:6466-6470 (1984); and Samulski et al., J. Virol. 63:03822-3828 (1989).

[0726] A base editor described herein can therefore be delivered with viral vectors. One or more components of the base editor system can be encoded on one or more viral vectors. For example, a base editor and guide nucleic acid can be encoded on a single viral vector. In other cases, the base editor and guide nucleic acid are encoded on different viral vectors. In either case, the base editor and guide nucleic acid can each be operably linked to a promoter and terminator.

[0727] The combination of components encoded on a viral vector can be determined by the cargo size constraints of the chosen viral vector.

### Non-Viral Delivery of Base Editors

[0728] Non-viral delivery approaches for base editors are also available. One important category of non-viral nucleic acid vectors are nanoparticles, which can be organic or inorganic. Nanoparticles are well known in the art. Any suitable nanoparticle design can be used to deliver genome editing system components or nucleic acids encoding such components. For instance, organic (e.g. lipid and/or polymer) nanoparticles can be suitable for use as delivery vehicles in certain embodiments of this disclosure. Exemplary lipids for use in nanoparticle formulations, and/or gene transfer are shown in Table 11 (below).

TABLE 11
Lipids Used for Gene Transfer

| Lipid | Abbreviation | Feature |
|---|---|---|
| 1,2-Dioleoyl-sn-glycero-3-phosphatidylcholine | DOPC | Helper |
| 1,2-Dioleoyl-n-glycero-3-phosphatidylethanolamine | DOPE | Helper |
| Cholesterol | | Helper |
| N-[1-(2,3-Dioleyloxy)prophyl]N,N,N-trimethylammonium | DOTMA | Cationic |
| chloride | | |
| 1,2-Dioleoyloxy-3-trimethylammonium-propane | DOTAP | Cationic |
| Dioctadecylamidoglycylspermine | DOGS | Cationic |
| N-(3-Aminopropy1)-N,N-dimethyl-2,3-bis(dodecyloxy)-1- | GAP-DLRIE | Cationic |
| propanaminium bromide | | |
| Cetyltrimethyl ammonium bromide | CTAB | Cationic |
| 6-Lauroxyhexyl ornithinate | LHON | Cationic |
| 1-(2,3-Dioleoyl oxypropy1)-2,4,6-trimethylpyridinium | 2Oc | Cationic |
| 2,3-Dioleyloxy-N-[2(sperminecarboxamido-ethyl]-N,N- | DOSPA | Cationic |
| dimethyl-1-propanaminium trifluoroacetate | | |
| 1,2-Dioleyl-3-trimethylammonium-propane | DOPA | Cationic |
| N-(2-Hydroxyethyl)-N,N-dimethyl-2,3-bis(tetradecyloxy)-1- | MDRIE | Cationic |
| propanaminium bromide | | |
| Dimyristooxypropyl dimethyl hydroxyethyl ammonium bromide | DMRI | Cationic |
| 3β-[N-(N',N'-Dimethylaminoethane)-carbamoyl]cholesterol | DC-Chol | Cationic |
| Bis-guanidium-tren-cholesterol | BGTC | Cationic |
| 1,3-Diodeoxy-2-(6-carboxy-spermy1)-propylamide | DOSPER | Cationic |
| Dimethyloctadecylammonium bromide | DDAB | Cationic |
| Dioctadecylamidoglicylspermidin | DSL | Cationic |
| rac-[(2,3-Dioctadecyloxypropyl)(2-hydroxyethyl)] | CLIP-1 | Cationic |
| dimethylammonium chloride | | |
| rac-[2(2,3-Dihexadecyloxypropyl | CLIP-6 | Cationic |
| oxymethyloxy)ethyl]trimethylammoniun bromide | | |
| Ethyldimyristoylphosphatidylcholine | EDMPC | Cationic |
| 1,2-Distearyloxy-N,N-dimethyl-3-aminopropane | DSDMA | Cationic |
| 1,2-Dimyristoyl-trimethylammonium propane | DMTAP | Cationic |
| O,O'-Dimyristyl-N-lysyl aspartate | DMKE | Cationic |
| 1,2-Distearoyl-sn-glycero-3-ethylpho sphocholine | DSEPC | Cationic |
| N-Palmitoyl D-erythro-sphingosyl carbamoyl-spermine | CCS | Cationic |
| N-t-Butyl-N0-tetradecyl-3-tetradecylaminopropionamidine | diC14-amidine | Cationic |
| Octadecenolyoxy[ethy1-2-heptadeceny1-3 hydroxyethyl] | DOTIM | Cationic |
| imidazolinium chloride | | |
| N1-Cholesteryloxycarbony1-3,7-diazanonane-1,9-diamine | CDAN | Cationic |
| 2-(3-[Bis(3-amino-propyl)-amino]propylamino)-N | RPR209120 | Cationic |
| ditetradecylcarbamoylme-ethyl-acetamide | | |
| 1,2-dilinoleyloxy-3-dimethylaminopropane | DLinDMA | Cationic |
| 2,2-dilinoley1-4-dimethylaminoethyl-[1,3]-dioxolane | DLin-KC2- | Cationic |
| | DMA | |
| dilinoleyl-methyl-4-dimethylaminobutyrate | DLin-MC3- | Cationic |
| | DMA | |

[0729] Table 12 lists exemplary polymers for use in gene transfer and/or nanoparticle formulations.

TABLE 12
Polymers Used for Gene Transfer

| Polymer | Abbreviation |
|---|---|
| Poly(ethylene)glycol | PEG |
| Polyethylenimine | PEI |
| Dithiobis (succinimidylpropionate) | DSP |
| Dimethyl-3,3'-dithiobispropionimidate | DTBP |
| Poly(ethylene imine)biscarbamate | PEIC |
| Poly(L-lysine) | PLL |
| Histidine modified PLL | |
| Poly(N-vinylpyrrolidone) | PVP |
| Poly(propylenimine) | PPI |
| Poly(amidoamine) | PANIAM |
| Poly(amidoethylenimine) | SS-PAEI |
| Triethylenetetramine | TETA |
| Poly(β-aminoester) | |
| Poly(4-hydroxy-L-proline ester) | PHP |
| Poly(allylamine) | |
| Poly(α-[4-aminobutyl]-L-glycolic acid) | PAGA |
| Poly(D,L-lactic-co-glycolic acid) | PLGA |
| Poly(N-ethyl-4-vinylpyridinium bromide) | bromide) |
| Poly(phosphazene)s | PPZ |
| Poly(phosphoester)s | PPE |
| Poly(phosphoramidate)s | PPA |
| Poly(N-2-hydroxypropylmethacrylamide) | pHPMA |
| Poly (2-(dimethylamino)ethyl methacrylate) | pDMAEMA |
| Poly(2-aminoethyl propylene phosphate) | PPE-EA |
| Chitosan | |
| Galactosylated chitosan | |
| N-Dodacylated chitosan | |
| Histone | |
| Collagen | |
| Dextran-spermine | D-SPM |

[0730] Table 13 summarizes delivery methods for a polynucleotide encoding a fusion protein described herein.

TABLE 13

| | | Delivery into | | | Type of |
|---|---|---|---|---|---|
| | | Non-Dividing | Duration of | Genome | Molecule |
| Delivery | Vector/Mode | Cells | Expression | Integration | Delivered |
| Physical | (e.g., | YES | Transient | NO | Nucleic Acids |
| | electroporation, | | | | and Proteins |
| | particle gun, | | | | |
| | Calcium | | | | |
| | Phosphate | | | | |
| | transfection | | | | |
| Viral | Retrovirus | NO | Stable | YES | RNA |
| | Lentivirus | YES | Stable | YES/NO with | RNA |
| | | | | modification | |
| | Adenovirus | YES | Transient | NO | DNA |
| | Adeno- | YES | Stable | NO | DNA |
| | Associated | | | | |
| | Virus (AAV) | | | | |
| | Vaccinia Virus | YES | Very | NO | DNA |
| | | | Transient | | |
| Herpes Simplex | YES | Stable | NO | DNA | |
| | Virus | | | | |
| Non-Viral | Cationic | YES | Transient | Depends on | Nucleic Acids |
| | Liposomes | | | what is | and Proteins |
| | | | | delivered | |
| | Polymeric | YES | Transient | Depends on | Nucleic Acids |
| | Nanoparticles | | | what is | and Proteins |
| | | | | delivered | |
| Biological | Attenuated | YES | Transient | NO | Nucleic Acids |
| Non-Viral | Bacteria | | | | |
| Delivery | Engineered | YES | Transient | NO | Nucleic Acids |
| Vehicles | Bacteriophages | | | | |
| | Mammalian | YES | Transient | NO | Nucleic Acids |
| | Virus-like | | | | |
| | Particles | | | | |
| | Biological | YES | Transient | NO | Nucleic Acids |
| | liposomes: | | | | |
| | Erythrocyte | | | | |
| | Ghosts and | | | | |
| | Exosomes | | | | |

[0731] In another aspect, the delivery of genome editing system components or nucleic acids encoding such components, for example, a nucleic acid binding protein such as, for example, Cas9 or variants thereof, and a gRNA targeting a genomic nucleic acid sequence of interest, may be accomplished by delivering a ribonucleoprotein (RNP) to cells. The RNP comprises the nucleic acid binding protein, e.g., Cas9, in complex with the targeting gRNA. RNPs may be delivered to cells using known methods, such as electroporation, nucleofection, or cationic lipid-mediated methods, for example, as reported by Zuris, J. A. et al., 2015, Nat. Biotechnology, 33(1):73-80. RNPs are advantageous for use in CRISPR base editing systems, particularly for cells that are difficult to transfect, such as primary cells. In addition, RNPs can also alleviate difficulties that may occur with protein expression in cells, especially when eukaryotic promoters, e.g., CMV or EF1A, which may be used in CRISPR plasmids, are not well-expressed. Advantageously, the use of RNPs does not require the delivery of foreign DNA into cells. Moreover, because an RNP comprising a nucleic acid binding protein and gRNA complex is degraded over time, the use of RNPs has the potential to limit off-target effects. In a manner similar to that for plasmid based techniques, RNPs can be used to deliver binding protein (e.g., Cas9 variants) and to direct homology directed repair (HDR).

[0732] A promoter used to drive base editor coding nucleic acid molecule expression can include AAV ITR. This can be advantageous for eliminating the need for an additional promoter element, which can take up space in the vector. The additional space freed up can be used to drive the expression of additional elements, such as a guide nucleic acid or a selectable marker. ITR activity is relatively weak, so it can be used to reduce potential toxicity due to over expression of the chosen nuclease.

[0733] Any suitable promoter can be used to drive expression of the base editor and, where appropriate, the guide nucleic acid. For ubiquitous expression, promoters that can be used include CMV, CAG, CBh, PGK, SV40, Ferritin heavy or light chains, etc. For brain or other CNS cell expression, suitable promoters can include: SynapsinI for all neurons, CaMKIIalpha for excitatory neurons, GAD67 or GAD65 or VGAT for GABAergic neurons, etc. For liver cell expression, suitable promoters include the Albumin promoter. For lung cell expression, suitable promoters can include SP-B. For endothelial cells, suitable promoters can include ICAM. For hematopoietic cells suitable promoters can include IFNbeta or CD45. For Osteoblasts suitable promoters can include OG-2.

[0734] In some cases, a base editor of the present disclosure is of small enough size to allow separate promoters to drive expression of the base editor and a compatible guide nucleic acid within the same nucleic acid molecule. For instance, a vector or viral vector can comprise a first promoter operably linked to a nucleic acid encoding the base editor and a second promoter operably linked to the guide nucleic acid.

[0735] The promoter used to drive expression of a guide nucleic acid can include: Pol III promoters such as U6 or H1 Use of Pol II promoter and intronic cassettes to express gRNA Adeno Associated Virus (AAV).

[0736] A base editor described herein with or without one or more guide nucleic can be delivered using adeno associated virus (AAV), lentivirus, adenovirus or other plasmid or viral vector types, in particular, using formulations and doses from, for example, U.S. Pat. No. 8,454,972 (formulations, doses for adenovirus), U.S. Pat. No. 8,404,658 (formulations, doses for AAV) and U.S. Pat. No. 5,846,946 (formulations, doses for DNA plasmids) and from clinical trials and publications regarding the clinical trials involving lentivirus, AAV and adenovirus. For example, for AAV, the route of administration, formulation and dose can be as in U.S. Pat. No. 8,454,972 and as in clinical trials involving AAV. For Adenovirus, the route of administration, formulation and dose can be as in U.S. Pat. No. 8,404,658 and as in clinical trials involving adenovirus. For plasmid delivery, the route of administration, formulation and dose can be as in U.S. Pat. No. 5,846,946 and as in clinical studies involving plasmids. Doses can be based on or extrapolated to an average 70 kg individual (e.g. a male adult human), and can be adjusted for patients, subjects, mammals of different weight and species. Frequency of administration is within the ambit of the medical or veterinary practitioner (e.g., physician, veterinarian), depending on usual factors including the age, sex, general health, other conditions of the patient or subject and the particular condition or symptoms being addressed. The viral vectors can be injected into the tissue of interest. For cell-type specific base editing, the expression of the base editor and optional guide nucleic acid can be driven by a cell-type specific promoter.

[0737] For in vivo delivery, AAV can be advantageous over other viral vectors. In some cases, AAV allows low toxicity, which can be due to the purification method not requiring ultra-centrifugation of cell particles that can activate the immune response. In some cases, AAV allows low probability of causing insertional mutagenesis because it doesn't integrate into the host genome.

[0738] AAV has a packaging limit of 4.5 or 4.75 Kb. This means disclosed base editor as well as a promoter and transcription terminator can fit into a single viral vector. Constructs larger than 4.5 or 4.75 Kb can lead to significantly reduced virus production. For example, SpCas9 is quite large, the gene itself is over 4.1 Kb, which makes it difficult for packing into AAV. Therefore, embodiments of the present disclosure include utilizing a disclosed base editor which is shorter in length than conventional base editors. In some examples, the base editors are less than 4 kb. Disclosed base editors can be less than 4.5 kb, 4.4 kb, 4.3 kb, 4.2 kb, 4.1 kb, 4 kb, 3.9 kb, 3.8 kb, 3.7 kb, 3.6 kb, 3.5 kb, 3.4 kb, 3.3 kb, 3.2 kb, 3.1 kb, 3 kb, 2.9 kb, 2.8 kb, 2.7 kb, 2.6 kb, 2.5 kb, 2 kb, or 1.5 kb. In some cases, the disclosed base editors are 4.5 kb or less in length.

[0739] An AAV can be AAV1, AAV2, AAV5 or any combination thereof. One can select the type of AAV with regard to the cells to be targeted; e.g., one can select AAV serotypes 1, 2, 5 or a hybrid capsid AAV1, AAV2, AAV5 or any combination thereof for targeting brain or neuronal cells; and one can select AAV4 for targeting cardiac tissue. AAV8 is useful for delivery to the liver. A tabulation of certain AAV serotypes as to these cells can be found in Grimm, D. et al, J. Virol. 82: 5887-5911 (2008)).

[0740] Lentiviruses are complex retroviruses that have the ability to infect and express their genes in both mitotic and post-mitotic cells. The most commonly known lentivirus is the human immunodeficiency virus (HIV), which uses the envelope glycoproteins of other viruses to target a broad range of cell types.

[0741] Lentiviruses can be prepared as follows. After cloning pCasES10 (which contains a lentiviral transfer plasmid backbone), HEK293FT at low passage (p=5) were seeded in a T-75 flask to 50% confluence the day before transfection in DMEM with 10% fetal bovine serum and without antibiotics. After 20 hours, media is changed to OptiMEM (serum-free) media and transfection was done 4 hours later. Cells are transfected with 10 μg of lentiviral transfer plasmid (pCasES10) and the following packaging plasmids: 5 μg of pMD2.G (VSV-g pseudotype), and 7.5 μg of psPAX2 (gag/pol/rev/tat). Transfection can be done in 4 mL OptiMEM with a cationic lipid delivery agent (50 μl Lipofectamine 2000 and 100 ul Plus reagent). After 6 hours, the media is changed to antibiotic-free DMEM with 10% fetal bovine serum. These methods use serum during cell culture, but serum-free methods are preferred.

[0742] Lentivirus can be purified as follows. Viral supernatants are harvested after 48 hours. Supernatants are first cleared of debris and filtered through a 0.45 μm low protein binding (PVDF) filter. They are then spun in an ultracentrifuge for 2 hours at 24,000 rpm. Viral pellets are resuspended in 50 μl of DMEM overnight at 4° C. They are then aliquoted and immediately frozen at −80° C.

[0743] In another embodiment, minimal non-primate lentiviral vectors based on the equine infectious anemia virus (EIAV) are also contemplated. In another embodiment, RETINOSTAT®, an equine infectious anemia virus-based lentiviral gene therapy vector that expresses angiostatic proteins endostatin and angiostatin that is contemplated to be delivered via a subretinal injection. In another embodiment, use of self-inactivating lentiviral vectors is contemplated.

[0744] Any RNA of the systems, for example a guide RNA or a base editor-encoding mRNA, can be delivered in the form of RNA. Base editor-encoding mRNA can be generated using in vitro transcription. For example, nuclease mRNA can be synthesized using a PCR cassette containing the following elements: T7 promoter, optional kozak sequence (GCCACC), nuclease sequence, and 3′ UTR such as a 3′ UTR from beta globin-polyA tail. The cassette can be used for transcription by T7 polymerase. Guide polynucleotides (e.g., gRNA) can also be transcribed using in vitro transcription from a cassette containing a T7 promoter, followed by the sequence “GG”, and guide polynucleotide sequence.

[0745] To enhance expression and reduce possible toxicity, the base editor-coding sequence and/or the guide nucleic acid can be modified to include one or more modified nucleoside e.g. using pseudo-U or 5-Methyl-C.

[0746] The disclosure in some embodiments comprehends a method of modifying a cell or organism. The cell can be a prokaryotic cell or a eukaryotic cell. The cell can be a mammalian cell. The mammalian cell many be a non-human primate, bovine, porcine, rodent or mouse cell. The modification introduced to the cell by the base editors, compositions and methods of the present disclosure can be such that the cell and progeny of the cell are altered for improved production of biologic products such as an antibody, starch, alcohol or other desired cellular output. The modification introduced to the cell by the methods of the present disclosure can be such that the cell and progeny of the cell include an alteration that changes the biologic product produced.

[0747] The system can comprise one or more different vectors. In an aspect, the base editor is codon optimized for expression the desired cell type, preferentially a eukaryotic cell, preferably a mammalian cell or a human cell.

[0748] In general, codon optimization refers to a process of modifying a nucleic acid sequence for enhanced expression in the host cells of interest by replacing at least one codon (e.g. about or more than about 1, 2, 3, 4, 5, 10, 15, 20, 25, 50, or more codons) of the native sequence with codons that are more frequently or most frequently used in the genes of that host cell while maintaining the native amino acid sequence. Various species exhibit particular bias for certain codons of a particular amino acid. Codon bias (differences in codon usage between organisms) often correlates with the efficiency of translation of messenger RNA (mRNA), which is in turn believed to be dependent on, among other things, the properties of the codons being translated and the availability of particular transfer RNA (tRNA) molecules. The predominance of selected tRNAs in a cell is generally a reflection of the codons used most frequently in peptide synthesis. Accordingly, genes can be tailored for optimal gene expression in a given organism based on codon optimization. Codon usage tables are readily available, for example, at the “Codon Usage Database” available at www.kazusa.orjp/codon/ (visited Jul. 9, 2002), and these tables can be adapted in a number of ways. See, Nakamura, Y., et al. “Codon usage tabulated from the international DNA sequence databases: status for the year 2000” Nucl. Acids Res. 28:292 (2000). Computer algorithms for codon optimizing a particular sequence for expression in a particular host cell are also available, such as Gene Forge (Aptagen; Jacobus, Pa.), are also available. In some embodiments, one or more codons (e.g. 1, 2, 3, 4, 5, 10, 15, 20, 25, 50, or more, or all codons) in a sequence encoding an engineered nuclease correspond to the most frequently used codon for a particular amino acid.

[0749] Packaging cells are typically used to form virus particles that are capable of infecting a host cell. Such cells include 293 cells, which package adenovirus, and psi.2 cells or PA317 cells, which package retrovirus. Viral vectors used in gene therapy are usually generated by producing a cell line that packages a nucleic acid vector into a viral particle. The vectors typically contain the minimal viral sequences required for packaging and subsequent integration into a host, other viral sequences being replaced by an expression cassette for the polynucleotide(s) to be expressed. The missing viral functions are typically supplied in trans by the packaging cell line. For example, AAV vectors used in gene therapy typically only possess ITR sequences from the AAV genome which are required for packaging and integration into the host genome. Viral DNA can be packaged in a cell line, which contains a helper plasmid encoding the other AAV genes, namely rep and cap, but lacking ITR sequences. The cell line can also be infected with adenovirus as a helper. The helper virus can promote replication of the AAV vector and expression of AAV genes from the helper plasmid. The helper plasmid in some cases is not packaged in significant amounts due to a lack of ITR sequences. Contamination with adenovirus can be reduced by, e.g., heat treatment to which adenovirus is more sensitive than AAV.

### Inteins

[0750] In some embodiments, a portion or fragment of a nuclease (e.g., Cas9) is fused to an intein. The nuclease can be fused to the N-terminus or the C-terminus of the intein. In some embodiments, a portion or fragment of a fusion protein is fused to an intein and fused to an AAV capsid protein. The intein, nuclease and capsid protein can be fused together in any arrangement (e.g., nuclease-intein-capsid, intein-nuclease-capsid, capsid-intein-nuclease, etc.). In some embodiments, the N-terminus of an intein is fused to the C-terminus of a fusion protein and the C-terminus of the intein is fused to the N-terminus of an AAV capsid protein.

[0751] Inteins (intervening protein) are auto-processing domains found in a variety of diverse organisms, which carry out a process known as protein splicing. Protein splicing is a multi-step biochemical reaction comprised of both the cleavage and formation of peptide bonds. While the endogenous substrates of protein splicing are proteins found in intein-containing organisms, inteins can also be used to chemically manipulate virtually any polypeptide backbone.

[0752] In protein splicing, the intein excises itself out of a precursor polypeptide by cleaving two peptide bonds, thereby ligating the flanking extein (external protein) sequences via the formation of a new peptide bond. This rearrangement occurs post-translationally (or possibly co-translationally). Intein-mediated protein splicing occurs spontaneously, requiring only the folding of the intein domain.

[0753] About 5% of inteins are split inteins, which are transcribed and translated as two separate polypeptides, the N-intein and C-intein, each fused to one extein. Upon translation, the intein fragments spontaneously and non-covalently assemble into the canonical intein structure to carry out protein splicing in trans. The mechanism of protein splicing entails a series of acyl-transfer reactions that result in the cleavage of two peptide bonds at the intein-extein junctions and the formation of a new peptide bond between the N- and C-exteins. This process is initiated by activation of the peptide bond joining the N-extein and the N-terminus of the intein. Virtually all inteins have a cysteine or serine at their N-terminus that attacks the carbonyl carbon of the C-terminal N-extein residue. This N to O/S acyl-shift is facilitated by a conserved threonine and histidine (referred to as the TXXH motif), along with a commonly found aspartate, which results in the formation of a linear (thio)ester intermediate. Next, this intermediate is subject to trans-(thio)esterification by nucleophilic attack of the first C-extein residue (+1), which is a cysteine, serine, or threonine. The resulting branched (thio)ester intermediate is resolved through a unique transformation: cyclization of the highly conserved C-terminal asparagine of the intein. This process is facilitated by the histidine (found in a highly conserved HNF motif) and the penultimate histidine and may also involve the aspartate. This succinimide formation reaction excises the intein from the reactive complex and leaves behind the exteins attached through a non-peptidic linkage. This structure rapidly rearranges into a stable peptide bond in an intein-independent fashion.

[0754] In some embodiments, an N-terminal fragment of a base editor (e.g., ABE, CBE) is fused to a split intein-N and a C-terminal fragment is fused to a split intein-C. These fragments are then packaged into two or more AAV vectors. The use of certain inteins for joining heterologous protein fragments is described, for example, in Wood et al., J. Biol. Chem. 289(21); 14512-9 (2014). For example, when fused to separate protein fragments, the inteins IntN and IntC recognize each other, splice themselves out and simultaneously ligate the flanking N- and C-terminal exteins of the protein fragments to which they were fused, thereby reconstituting a full-length protein from the two protein fragments. Other suitable inteins will be apparent to a person of skill in the art.

[0755] In some embodiments, an ABE was split into N- and C-terminal fragments at Ala, Ser, Thr, or Cys residues within selected regions of SpCas9. These regions correspond to loop regions identified by Cas9 crystal structure analysis. The N-terminus of each fragment is fused to an intein-N and the C-terminus of each fragment is fused to an intein C at amino acid positions S303, T310, T313, S355, A456, S460, A463, T466, S469, T472, T474, C574, S577, A589, and S590, which are indicated in bold capital letters in the sequence below.

| | |
|---|---|
| 1 | mdkkysigld igtnsvgwav itdeykvpsk kfkvlgntdr hsikknliga llfdsgetae |
| 61 | atrlkrtarr rytrrknric ylqeifsnem akvddsffhr leesflveed kkherhpifg |
| 121 | nivdevayhe kyptiyhlrk klvdstdkad lrliylalah mikfrghfli egdlnpdnsd |
| 181 | vdklfiqlvg tynqlfeenp inasgvdaka ilsarlsksr rlenliaqlp gekknglfgn |
| 241 | lialslgltp nfksnfdlae daklqlskdt ydddldnlla qigdqyadlf laaknlsdai |
| 301 | llSdilrvnT eiTkaplsas mikrydehhq dltllkalvr qqlpekykei ffdqSkngya |
| 361 | gyidggasqe efykfikpil ekmdgteell vklnredllr kqrtfdngsi phqihlgelh |
| 421 | ailrrqedfy pflkdnreki ekiltfripy yvgplArgnS rfAwmTrkSe eTiTpwnfee |
| 481 | vvdkgasaqs fiermtnfdk nlpnekvlpk hsllyeyftv yneltkvkyv tegmrkpafl |
| 541 | sgeqkkaivd llfktnrkvt vkqlkedyfk kieCfdSvei sgvedrfnAS lgtyhdllki |
| 601 | ikdkdfldne enedilediv ltltlfedre mieerlktya hlfddkvmkq lkrrrytgwg |
| 661 | rlsrklingi rdkqsgktil dflksdgfan rnfmqlihdd sltfkediqk aqvsgqgdsl |
| 721 | hehianlags paikkgilqt vkvvdelvkv mgrhkpeniv iemarenqtt qkgqknsrer |
| 781 | mkrieegike lgsqilkehp ventqlqnek lylyylqngr dmyvdgeldi nrlsdydvdh |
| 841 | ivpqsflkdd sidnkvltrs dknrgksdnv pseevvkkmk nywrqllnak litqrkfdnl |
| 901 | tkaergglse ldkagfikrq lvetrqitkh vaqildsrmn tkydendkli revkvitlks |
| 961 | klvsdfrkdf qfykvreinn yhhandayln avvgtalikk ypklesefvy gdykvydvrk |
| 1021 | miakseqeig katakyffys nimnffktei tlangeirkr plietngetg eivwdkgrdf |
| 1081 | atvrkvlsmp qvnivkktev qtggfskesi lpkrnsdkli arkkdwdpkk yggfdsptva |
| 1141 | ysvlvvakve kgkskklksv kellgitime rssfeknpid fleakgykev kkdliiklpk |
| 1201 | yslfelengr krmlasagel qkgnelalps kyvnflylas hyeklkgspe dneqkqlfve |
| 1261 | qhkhyldeii eqisefskrv iladanldkv lsaynkhrdk pireqaenii hlftltnlga |
| 1321 | paafkyfdtt idrkrytstk evldatlihq sitglyetri dlsqlggd |

### Pharmaceutical Compositions

[0756] Other aspects of the present disclosure relate to pharmaceutical compositions comprising any of the base editors, fusion proteins, or the fusion protein-guide polynucleotide complexes described herein. The term “pharmaceutical composition”, as used herein, refers to a composition formulated for pharmaceutical use. In some embodiments, the pharmaceutical composition further comprises a pharmaceutically acceptable carrier. In some embodiments, the pharmaceutical composition comprises additional agents (e.g., for specific delivery, increasing half-life, or other therapeutic compounds).

[0757] As used here, the term “pharmaceutically-acceptable carrier” means a pharmaceutically-acceptable material, composition or vehicle, such as a liquid or solid filler, diluent, excipient, manufacturing aid (e.g., lubricant, talc magnesium, calcium or zinc stearate, or steric acid), or solvent encapsulating material, involved in carrying or transporting the compound from one site (e.g., the delivery site) of the body, to another site (e.g., organ, tissue or portion of the body). A pharmaceutically acceptable carrier is “acceptable” in the sense of being compatible with the other ingredients of the formulation and not injurious to the tissue of the subject (e.g., physiologically compatible, sterile, physiologic pH, etc.).

[0758] Some nonlimiting examples of materials which can serve as pharmaceutically-acceptable carriers include: (1) sugars, such as lactose, glucose and sucrose; (2) starches, such as corn starch and potato starch; (3) cellulose, and its derivatives, such as sodium carboxymethyl cellulose, methylcellulose, ethyl cellulose, microcrystalline cellulose and cellulose acetate; (4) powdered tragacanth; (5) malt; (6) gelatin; (7) lubricating agents, such as magnesium stearate, sodium lauryl sulfate and talc; (8) excipients, such as cocoa butter and suppository waxes; (9) oils, such as peanut oil, cottonseed oil, safflower oil, sesame oil, olive oil, corn oil and soybean oil; (10) glycols, such as propylene glycol; (11) polyols, such as glycerin, sorbitol, mannitol and polyethylene glycol (PEG); (12) esters, such as ethyl oleate and ethyl laurate; (13) agar; (14) buffering agents, such as magnesium hydroxide and aluminum hydroxide; (15) alginic acid; (16) pyrogen-free water; (17) isotonic saline; (18) Ringer's solution; (19) ethyl alcohol; (20) pH buffered solutions; (21) polyesters, polycarbonates and/or polyanhydrides; (22) bulking agents, such as polypeptides and amino acids (23) serum alcohols, such as ethanol; and (23) other non-toxic compatible substances employed in pharmaceutical formulations. Wetting agents, coloring agents, release agents, coating agents, sweetening agents, flavoring agents, perfuming agents, preservative and antioxidants can also be present in the formulation. The terms such as “excipient,” “carrier,” “pharmaceutically acceptable carrier,” “vehicle,” or the like are used interchangeably herein.

[0759] Pharmaceutical compositions can comprise one or more pH buffering compounds to maintain the pH of the formulation at a predetermined level that reflects physiological pH, such as in the range of about 5.0 to about 8.0. The pH buffering compound used in the aqueous liquid formulation can be an amino acid or mixture of amino acids, such as histidine or a mixture of amino acids such as histidine and glycine. Alternatively, the pH buffering compound is preferably an agent which maintains the pH of the formulation at a predetermined level, such as in the range of about 5.0 to about 8.0, and which does not chelate calcium ions. Illustrative examples of such pH buffering compounds include, but are not limited to, imidazole and acetate ions. The pH buffering compound may be present in any amount suitable to maintain the pH of the formulation at a predetermined level.

[0760] Pharmaceutical compositions can also contain one or more osmotic modulating agents, i.e., a compound that modulates the osmotic properties (e.g, tonicity, osmolality, and/or osmotic pressure) of the formulation to a level that is acceptable to the blood stream and blood cells of recipient individuals. The osmotic modulating agent can be an agent that does not chelate calcium ions. The osmotic modulating agent can be any compound known or available to those skilled in the art that modulates the osmotic properties of the formulation. One skilled in the art may empirically determine the suitability of a given osmotic modulating agent for use in the inventive formulation. Illustrative examples of suitable types of osmotic modulating agents include, but are not limited to: salts, such as sodium chloride and sodium acetate; sugars, such as sucrose, dextrose, and mannitol; amino acids, such as glycine; and mixtures of one or more of these agents and/or types of agents. The osmotic modulating agent(s) may be present in any concentration sufficient to modulate the osmotic properties of the formulation.

[0761] In some embodiments, the pharmaceutical composition is formulated for delivery to a subject, e.g., for gene editing. Suitable routes of administrating the pharmaceutical composition described herein include, without limitation: topical, subcutaneous, transdermal, intradermal, intralesional, intraarticular, intraperitoneal, intravesical, transmucosal, gingival, intradental, intracochlear, transtympanic, intraorgan, epidural, intrathecal, intramuscular, intravenous, intravascular, intraosseus, periocular, intratumoral, intracerebral, and intracerebroventricular administration.

[0762] In some embodiments, the pharmaceutical composition described herein is administered locally. In some embodiments, the pharmaceutical composition described herein is administered to a subject by injection, by means of a catheter, by means of a suppository, or by means of an implant, the implant being of a porous, non-porous, or gelatinous material, including a membrane, such as a sialastic membrane, or a fiber.

[0763] In other embodiments, the pharmaceutical composition described herein is delivered in a controlled release system. In one embodiment, a pump can be used (See, e.g., Langer, 1990, Science 249:1527-1533; Sefton, 1989, CRC Crit. Ref. Biomed. Eng. 14:201; Buchwald et al., 1980, Surgery 88:507; Saudek et al., 1989, N. Engl. J. Med. 321:574). In another embodiment, polymeric materials can be used. (See, e.g., Medical Applications of Controlled Release (Langer and Wise eds., CRC Press, Boca Raton, Fla., 1974); Controlled Drug Bioavailability, Drug Product Design and Performance (Smolen and Ball eds., Wiley, New York, 1984); Ranger and Peppas, 1983, Macromol. Sci. Rev. Macromol. Chem. 23:61. See also Levy et al., 1985, Science 228:190; During et al., 1989, Ann. Neurol. 25:351; Howard et ah, 1989, J. Neurosurg. 71:105.) Other controlled release systems are discussed, for example, in Langer, supra.

[0764] In some embodiments, the pharmaceutical composition is formulated in accordance with routine procedures as a composition adapted for intravenous or subcutaneous administration to a subject, e.g., a human. In some embodiments, pharmaceutical composition for administration by injection are solutions in sterile isotonic use as solubilizing agent and a local anesthetic such as lignocaine to ease pain at the site of the injection. Generally, the ingredients are supplied either separately or mixed together in unit dosage form, for example, as a dry lyophilized powder or water free concentrate in a hermetically sealed container such as an ampoule or sachette indicating the quantity of active agent. Where the pharmaceutical is to be administered by infusion, it can be dispensed with an infusion bottle containing sterile pharmaceutical grade water or saline. Where the pharmaceutical composition is administered by injection, an ampoule of sterile water for injection or saline can be provided so that the ingredients can be mixed prior to administration.

[0765] A pharmaceutical composition for systemic administration can be a liquid, e.g., sterile saline, lactated Ringer's or Hank's solution. In addition, the pharmaceutical composition can be in solid forms and re-dissolved or suspended immediately prior to use. Lyophilized forms are also contemplated. The pharmaceutical composition can be contained within a lipid particle or vesicle, such as a liposome or microcrystal, which is also suitable for parenteral administration. The particles can be of any suitable structure, such as unilamellar or plurilamellar, so long as compositions are contained therein. Compounds can be entrapped in “stabilized plasmid-lipid particles” (SPLP) containing the fusogenic lipid dioleoylphosphatidylethanolamine (DOPE), low levels (5-10 mol %) of cationic lipid, and stabilized by a polyethyleneglycol (PEG) coating (Zhang Y. P. et ah, Gene Ther. 1999, 6: 1438-47). Positively charged lipids such as N-[1-(2,3-dioleoyloxi)propyl]-N,N,N-trimethyl-amoniummethylsulfate, or “DOTAP,” are particularly preferred for such particles and vesicles. The preparation of such lipid particles is well known. See, e.g., U.S. Pat. Nos. 4,880,635; 4,906,477; 4,911,928; 4,917,951; 4,920,016; and 4,921,757; each of which is incorporated herein by reference.

[0766] The pharmaceutical composition described herein can be administered or packaged as a unit dose, for example. The term “unit dose” when used in reference to a pharmaceutical composition of the present disclosure refers to physically discrete units suitable as unitary dosage for the subject, each unit containing a predetermined quantity of active material calculated to produce the desired therapeutic effect in association with the required diluent; i.e., carrier, or vehicle.

[0767] Further, the pharmaceutical composition can be provided as a pharmaceutical kit comprising (a) a container containing a compound of the invention in lyophilized form and (b) a second container containing a pharmaceutically acceptable diluent (e.g., sterile used for reconstitution or dilution of the lyophilized compound of the invention. Optionally associated with such container(s) can be a notice in the form prescribed by a governmental agency regulating the manufacture, use or sale of pharmaceuticals or biological products, which notice reflects approval by the agency of manufacture, use or sale for human administration.

[0768] In another aspect, an article of manufacture containing materials useful for the treatment of the diseases described above is included. In some embodiments, the article of manufacture comprises a container and a label. Suitable containers include, for example, bottles, vials, syringes, and test tubes. The containers can be formed from a variety of materials such as glass or plastic. In some embodiments, the container holds a composition that is effective for treating a disease described herein and can have a sterile access port. For example, the container can be an intravenous solution bag or a vial having a stopper pierceable by a hypodermic injection needle. The active agent in the composition is a compound of the invention. In some embodiments, the label on or associated with the container indicates that the composition is used for treating the disease of choice. The article of manufacture can further comprise a second container comprising a pharmaceutically-acceptable buffer, such as phosphate-buffered saline, Ringer's solution, or dextrose solution. It can further include other materials desirable from a commercial and user standpoint, including other buffers, diluents, filters, needles, syringes, and package inserts with instructions for use.

[0769] In some embodiments, any of the fusion proteins, gRNAs, and/or complexes described herein are provided as part of a pharmaceutical composition. In some embodiments, the pharmaceutical composition comprises any of the fusion proteins provided herein. In some embodiments, the pharmaceutical composition comprises any of the complexes provided herein. In some embodiments, the pharmaceutical composition comprises a ribonucleoprotein complex comprising an RNA-guided nuclease (e.g., Cas9) that forms a complex with a gRNA and a cationic lipid. In some embodiments pharmaceutical composition comprises a gRNA, a nucleic acid programmable DNA binding protein, a cationic lipid, and a pharmaceutically acceptable excipient. Pharmaceutical compositions can optionally comprise one or more additional therapeutically active substances.

### Use of Nucleobase Editors to Target Nucleotides in HBV ORFS

[0770] The suitability of nucleobase editors that target a nucleotide in an HBV ORF is evaluated as described herein. In one embodiment, a single cell of interest (e.g., an animal cell infected with HBV) is transfected, transduced, or otherwise modified with a nucleic acid molecule or molecules encoding a nucleobase editor described herein together with a small amount of a vector encoding a reporter (e.g., GFP). These cells can be immortalized human cell lines, such as 293T, K562 or U20S. Alternatively, primary human cells may be used. Such cells may be relevant to the eventual cell target.

[0771] Delivery may be performed using a viral vector. In one embodiment, transfection may be performed using lipid transfection (such as Lipofectamine or Fugene) or by electroporation. Following transfection, expression of GFP can be determined either by fluorescence microscopy or by flow cytometry to confirm consistent and high levels of transfection. These preliminary transfections can comprise different nucleobase editors to determine which combinations of editors give the greatest activity.

[0772] The activity of the nucleobase editor is assessed as described herein, i.e., by sequencing the genome or ORFs of HBV to detect alterations in a target sequence. For Sanger sequencing, purified PCR amplicons are cloned into a plasmid backbone, transformed, miniprepped and sequenced with a single primer. Sequencing may also be performed using next generation sequencing techniques. When using next generation sequencing, amplicons may be 300-500 bp with the intended cut site placed asymmetrically. Following PCR, next generation sequencing adapters and barcodes (for example Illumina multiplex adapters and indexes) may be added to the ends of the amplicon, e.g., for use in high throughput sequencing (for example on an Illumina MiSeq).

[0773] The fusion proteins that induce the greatest levels of target specific alterations in initial tests can be selected for further evaluation.

[0774] In particular embodiments, the nucleobase editors are used to target polynucleotides of interest. In one embodiment, a nucleobase editor of the invention is delivered to cells (e.g., liver) in conjunction with a guide RNA that is used to target a nucleic acid sequence within the HBV genome, thereby altering the HBV gene.

[0775] In some embodiments, a base editor is targeted by a guide RNA to introduce one or more missense mutations or premature stop codons in the polymerase (pol) gene of the HBV genome. In some embodiments, the one or more mutations introduced into the pol gene by the base editor encode E24G, L25F, P26F, R27C, V48A, V48I, S382F, V378I, V378A, V379I, V379A, L377F, D380G, D380N, F381P, R376G, A422T, F423P, A432V, M433V, P434S, D540G, A688V, D689G, A717T, E718K, P713S, P713L, and L719P. In some embodiments, the one or more mutations introduced into the pol gene are mutations selected from the group consisting of E24G, L25F, P26F, R27C, V48A, V48I, S382F, V378I, V378A, V379I, V379A, L377F, D380G, D380N, F381P, R376G, A422T, F423P, A432V, M433V, P434S, D540G, A688V, D689G, A717T, E718K, P713S, P713L, and L719P.

[0776] In some embodiments, a base editor as described herein is targeted by a guide RNA to introduce one or more missense mutations or premature stop codons in the core gene of the HBV genome. In some embodiments, the one or more mutations introduced into the core gene comprise T160A, T160A, P161F, S162L, C183R, and/or *(STOP)184Q. In some embodiments, the one or more mutations introduced into the core gene are selected from the group consisting of T160A, T160A, P161F, S162L, C183R, and *(STOP)184Q.

[0777] In some embodiments, a base editor as described herein is targeted by a guide RNA to introduce one or more missense mutations or premature stop codons into the X gene of the HBV genome. In some embodiments, the one or more mutations introduced into the X gene comprise H86Y, R87*(STOP), H86R, W120R, W120STOP, E122K, E121K, and/or L141P. In some embodiments, the one or more mutations introduced into the core gene are selected from the group consisting of H86Y, R87*(STOP), H86R, W120R, W120STOP, E122K, E121K, and L141P.

[0778] In some embodiments, a base editor as described herein is targeted by a guide RNA to introduce one or more missense mutations or premature stop codons into the S gene of the HBV genome. In some embodiments, the one or more mutations comprise S38F, L39F, W35STOP, W35R, W36STOP, W36R, T37I, T37A, R78Q, S34L, F80P, and/or D33G. In some embodiments, the one or more mutations introduced into the S gene are selected from the group consisting of S38F, L39F, W35*(STOP), W35R, W36*(STOP), W36R, T37I, T37A, R78Q, S34L, F80P, and D33G.

### Kits

[0779] Various aspects of this disclosure provide kits comprising a base editor system. In one embodiment, the kit comprises a nucleic acid construct comprising a nucleotide sequence encoding a nucleobase editor fusion protein. The fusion protein comprises a deaminase (e.g., cytidine deaminase or adenine deaminase) and a nucleic acid programmable DNA binding protein (napDNAbp). In some embodiments, the kit comprises at least one guide RNA capable of targeting an HBV gene. In some embodiments, the kit comprises a nucleic acid construct comprising a nucleotide sequence encoding at least one guide RNA.

[0780] The kit provides, in some embodiments, instructions for using the kit to edit one or more genes in the HBV genome. The instructions will generally include information about the use of the kit for the editing nucleic acids and especially viral nucleic acids. In other embodiments, the instructions include at least one of the following: precautions; warnings; clinical studies; and/or references. The instructions may be printed directly on the container (when present), or as a label applied to the container, or as a separate sheet, pamphlet, card, or folder supplied in or with the container. In a further embodiment, a kit can comprise instructions in the form of a label or separate insert (package insert) for suitable operational parameters. In yet another embodiment, the kit can comprise one or more containers with appropriate positive and negative controls or control samples, to be used as standard(s) for detection, calibration, or normalization.

[0781] In certain embodiments, the kit is useful for the treatment of a subject having an HBV infection.

### Methods of Treating HBV Infection

[0782] The present invention provides methods of treating an HBV infection or symptoms thereof that comprise administering to a subject (e.g., a mammal, such as a human) a therapeutically effective amount of a pharmaceutical composition that comprises a polynucleotide encoding a base editor system (e.g., base editor and gRNA) described herein. In some embodiments, the base editor is a fusion protein that comprises a polynucleotide programmable DNA binding domain and an adenosine deaminase domain or a cytidine deaminase domain. A cell of the subject is transduced with the base editor and one or more guide polynucleotides that target the base editor to effect an A·T to G·C alteration (if the cell is transduced with an adenosine deaminase domain) or a C·G to U·A alteration (if the cell is transduced with a cytidine deaminase domain) of a nucleic acid sequence encoding an HBV polypeptide.

[0783] In some embodiments, treatment of chronic Hepatitis B includes a combination of approaches. For example, a subject infected with HBV can be administered a therapeutically effective amount of a pharmaceutical combination described above that targets and modifies HBV cccDNA. For example, a BE4 base editor without a UGI domain can be used with a gRNA targeting a region of the HBV genome. Without being bound by theory, omitting the inhibitor makes C->U deamination susceptible to uracil glycosylase which damages HBV cccDNA, thus destabilizing it. This treatment can be combined with a treatment that reduce or inhibit HBsAg expression (including from integrated HBV DNA), such as targeting the S or pol gene of the HBV genome using the base editors and guide RNAs described herein. Treatment can also comprise stimulating the immune system. In some embodiments, each of these three distinct therapeutic goals can be accomplished using the base editing reagents and techniques described herein.

[0784] The methods herein include administering to the subject (including a subject identified as in need of such treatment) an effective amount of a composition described herein. Identifying a subject in need of such treatment can be in the judgment of a subject or a health care professional and can be subjective (e.g. opinion) or objective (e.g. measurable by a test or diagnostic method).

[0785] The therapeutic methods of the invention in general comprise administration of a therapeutically effective amount of a pharmaceutical composition comprising, for example, a vector encoding a base editor and a gRNA that targets an HBV gene of interest to a subject (e.g., human) in need thereof. Such treatment will be suitably administered to subjects, particularly humans, suffering from, having, susceptible to, or at risk for HBV infection. The compositions herein may be also used in the treatment of any other disorders in which HBV infection may be implicated.

[0786] In one embodiment, the invention provides a method of monitoring treatment progress. The method includes the step of determining a level of diagnostic marker (Marker) (e.g., viral load) or diagnostic measurement (e.g., screen, assay) in a subject suffering from or susceptible to a disorder or symptoms thereof associated with HBV infection in which the subject has been administered a therapeutic amount of a composition herein sufficient to treat the disease or symptoms thereof. The level of Marker determined in the method can be compared to known levels of Marker in either healthy normal controls or in other afflicted patients to establish the subject's disease status. In preferred embodiments, a second level of Marker in the subject is determined at a time point later than the determination of the first level, and the two levels are compared to monitor the course of disease or the efficacy of the therapy. In certain preferred embodiments, a pre-treatment level of Marker in the subject is determined prior to beginning treatment according to this invention; this pre-treatment level of Marker can then be compared to the level of Marker in the subject after the treatment commences, to determine the efficacy of the treatment.

[0787] The practice of the present invention employs, unless otherwise indicated, conventional techniques of molecular biology (including recombinant techniques), microbiology, cell biology, biochemistry and immunology, which are well within the purview of the skilled artisan. Such techniques are explained fully in the literature, such as, “Molecular Cloning: A Laboratory Manual”, second edition (Sambrook, 1989); “Oligonucleotide Synthesis” (Gait, 1984); “Animal Cell Culture” (Freshney, 1987); “Methods in Enzymology” “Handbook of Experimental Immunology” (Weir, 1996); “Gene Transfer Vectors for Mammalian Cells” (Miller and Calos, 1987); “Current Protocols in Molecular Biology” (Ausubel, 1987); “PCR: The Polymerase Chain Reaction”, (Mullis, 1994); “Current Protocols in Immunology” (Coligan, 1991). These techniques are applicable to the production of the polynucleotides and polypeptides of the invention, and, as such, may be considered in making and practicing the invention. Particularly useful techniques for particular embodiments will be discussed in the sections that follow.

[0788] The following examples are put forth so as to provide those of ordinary skill in the art with a complete disclosure and description of how to make and use the assay, screening, and therapeutic methods of the invention, and are not intended to limit the scope of what the inventors regard as their invention.

### EXAMPLES

### Example 1: Targeted Base Editing of the HBV Genome Resulted in Premature Stop Codons or Functional Substitutions in Viral Genes

[0789] Bases editors (FIG. 4A, 4B) were evaluated for their ability to edit the HBV genome. Guide RNAs were designed to target the base editors to introduce stop codons or functional substitutions at conserved regions of HBV genes (FIG. 5). HBV Genotype D, subgenotype ayw, was analyzed using a CRISPR design tool available on Benchling Software to identify potential guide RNAs, and the level of sequence conservation across all HBV genotypes was determined for each guide RNA. 97 guide RNAs that would target a base editor to introduce a stop codon or functional change in an HBV gene based on the cytosine position in the editing window were selected for testing (Table 14). These guide RNAs were adjacent or in proximity to NGG, NAG, and NNNRRT (including NNGRRT) PAM sequences.

TABLE 14
Guide RNAs

| | | | | | | % |
|---|---|---|---|---|---|---|
| | | % Stop | Guide | | | Conservation |
| Guide | gRNA | Edit | Strand | PAM | Gene | All Genotypes |
| AATACCGCAGAGTCTAGACT | M1 | 0.47 | 1 | NNNRRT | S | 37.15943898 |
| TCCACCACGAGTCTAGACTC | M2 | 15.09 | -1 | NNNRRT | S | 96.35660164 |
| CACATCCAGCGATAACCAGG | M3 | 21.26 | -1 | NNNRRT | S | 54.84443011 |
| AAAGCCCAGGATGATGGGAT | M4 | 1.85 | -1 | NNGRRT | S | 42.35047558 |
| CGAACCACTGAACAAATGGC | M5 | 6.5 | -1 | NNNRRT | S | 92.95502176 |
| ATCCATATAACTGAAAGCCA | M6 | 28.28 | -1 | NNNRRT | S | 74.33499919 |
| ATACCCAAAGACAAAAGAAA | M7 | 3.03 | -1 | NNNRRT | S | 75.57633403 |
| ATGCAACTTTTTCACCTCTG | M8 | 0.01 | 1 | NNNRRT | Core | 94.08350798 |
| TCAAGCCTCCAAGCTGTGCC | M9 | 1.67 | 1 | NNGRRT | Core | 97.93648235 |
| CCCAGCAAAGAATTGCTTGC | M10 | 0.1 | -1 | NNGRRT | Core | 9.285829437 |
| CCACCCAGGTAGCTAGAGTC | M11 | 4.04 | -1 | NNNRRT | Core | 21.32838949 |
| AATCCACACTCCGAAAGACA | M12 | 8.95 | -1 | NNNRRT | Core | 14.78316943 |
| GTCTCAATCGCCGCGTCGCA | M13 | 9.66 | 1 | NNNRRT | Core | 68.25729486 |
| AAGATCTCAATCTCGGGAAC | M14 | 13.47 | 1 | NNNRRT | Core | 5.271642754 |
| TTTTCCAATGAGGATTAAAG | M15 | 56.89 | -1 | NNNRRT | Pol | 3.111397711 |
| TTTACACCAAGACATTATCA | M16 | 7.15 | 1 | NNNRRT | Pol | 10.23698211 |
| GAACAGTTTGTAGGCCCACT | M17 | 0.17 | 1 | NNNRRT | Pol | 3.256488796 |
| ATTGCAATTGATTATGCCTG | M18 | 0.73 | 1 | NNNRRT | Pol | 3.320973722 |
| CGCCTTCCATAGAGTGTGTA | M19 | ND | -1 | NNNRRT | Pol | 15.25068515 |
| CCCAAGAATATGGTGACCCA | M20 | 6.59 | -1 | NNNRRT | Pol | 53.32903434 |
| ACAAGATCTACAGCATGGGG | M21 | 13.57 | 1 | NNGRRT | Pol | 2.579397066 |
| CAGCCTTCAGAGCAAACACA | M22 | 18.65 | 1 | NNNRRT | Pol | 1.338062228 |
| TCAGAGCAAACACAGCAAAT | M23 | 0.55 | 1 | NNNRRT | Pol | 1.35418346 |
| CCCCAATCCTCGAGAAGATT | M24 | 0.31 | -1 | NNNRRT | Pol | 18.49105272 |
| CCAGGACAAGTTGGAGGACA | M25 | 3.1 | -1 | NNNRRT | Pol | 28.43785265 |
| GCTGTACCAAACCTTCGGAC | M26 | 12.17 | 1 | NNNRRT | Pol | 13.92874416 |
| ACCCCATCTCTTTGTTTTGT | M27 | 0.15 | -1 | NNGRRT | Pol | 4.981460584 |
| CCACAAGAACACATCATACA | M28 | 0.29 | 1 | NNNRRT | Pol | 1.837820409 |
| ACTTTCCAATCAATAGGCCT | M29 | 4.1 | -1 | NNNRRT | Pol | 2.063517653 |
| GTCAACGAATTGTGGGTCTT | M30 | 0.02 | 1 | NNGRRT | Pol | 3.981944221 |
| ACACAATGTGGTTATCCTGC | M31 | 0.17 | 1 | NNNRRT | Pol | 17.58826374 |
| CGGCAACGGCCAGGTCTGTG | M32 | 1.28 | 1 | NNNRRT | Pol | 20.13541835 |
| GTGGTCTCCATGCGACGTGC | M33 | 34.2 | -1 | NNNRRT | Pol | 68.4829921 |
| TACCGCAGAGTCTAGACTCG | M34 | 6.7 | 1 | NGG | S | 37.06271159 |
| CGCAGAGTCTAGACTCGTGG | M35 | 0.53 | 1 | NGG | S | 37.12719652 |
| CACCACGAGTCTAGACTCTG | M36 | 3.14 | -1 | NGG | S | 94.29308399 |
| GAAAGCCCAGGATGATGGGA | M37 | 16.59 | -1 | NGG | S | 40.59326133 |
| CCACCCAAGGCACAGCTTGG | M38 | 0.31 | -1 | NGG | Core | 94.53490247 |
| AAGCCACCCAAGGCACAGCT | M39 | 27.31 | -1 | NGG | Core | 94.61550862 |
| CCATGCCCCAAAGCCACCCA | M40 | 30.21 | -1 | NGG | Core | 64.59777527 |
| TCAGGCAAGCAATTCTTTGC | M41 | 4.01 | 1 | NGG | Core | 9.592132839 |
| CAGGCAAGCAATTCTTTGCT | M42 | 6.22 | 1 | NGG | Core | 9.576011607 |
| AGGCAAGCAATTCTTTGCTG | M43 | 0.91 | 1 | NGG | Core | 9.592132839 |
| GGCAAGCAATTCTTTGCTGG | M44 | 0.32 | 1 | NGG | Core | 8.189585684 |
| GCAAGCAATTCTTTGCTGGG | M45 | 0.02 | 1 | NGG | Core | 8.221828148 |
| TCCAAGGAATACTAACATTG | M46 | 50.79 | -1 | NGG | Pol | 2.950185394 |
| TTCCAATGAGGATTAAAGAC | M47 | 45.95 | -1 | NGG | Pol | 3.337094954 |
| TGCAATTGATTATGCCTGCT | M48 | 1.16 | 1 | NGG | Pol | 8.866677414 |
| TGGGAACAAGATCTACAGCA | M49 | 30.73 | 1 | NGG | Pol | 22.31178462 |
| GGGAACAAGATCTACAGCAT | M50 | 51.93 | 1 | NGG | Pol | 22.27954216 |
| GGAACAAGATCTACAGCATG | M51 | 40.48 | 1 | NGG | Pol | 3.320973722 |
| TCAATCCCAACAAGGACACC | M52 | 58.84 | 1 | NGG | Pol | 15.29904885 |
| GACGCCAACAAGGTAGGAGC | M53 | 36.32 | 1 | NGG | Pol | 15.91165565 |
| TGCTCCAGCTCCTACCTTGT | M54 | 45.57 | -1 | NGG | Pol | 16.16959536 |
| CCACCAATCGCCAGACAGGA | M55 | 27.87 | 1 | NGG | Pol | 0.709334193 |
| AGCCACCAGCAGGGAAATAC | M56 | 41.17 | -1 | NGG | Pol | 16.73383847 |
| ACCAGGACAAGTTGGAGGAC | M57 | 18.71 | -1 | NGG | Pol | 16.21795905 |
| CGATAACCAGGACAAGTTGG | M58 | 44.43 | -1 | NGG | Pol | 18.2814767 |
| CCCATCTCTTTGTTTTGTTA | M59 | 0.45 | -1 | NGG | Pol | 4.933096889 |
| CCCCATCTCTTTGTTTTGTT | M60 | 2.03 | -1 | NGG | Pol | 5.223279059 |
| TCAACGAATTGTGGGTCTTT | M61 | 5.2 | 1 | NGG | Pol | 23.48863453 |
| CAACGAATTGTGGGTCTTTT | M62 | 1.6 | 1 | NGG | Pol | 24.81057553 |
| GGTCTCCATGCGACGTGCAG | M63 | 27.5 | -1 | NGG | Pol | 68.88602289 |
| ACAGGCGGGGTTTTTCTTGT | M64 | ND | 1 | NGA | S | 86.8128325 |
| GCAGAGTCTAGACTCGTGGT | M65 | 0.02 | 1 | NGA | S | 37.19168144 |
| GAGAAGTCCACCACGAGTCT | M66 | 26.51 | -1 | NGA | S | 97.16266323 |
| GACACATCCAGCGATAACCA | M67 | 37.7 | -1 | NGA | S | 54.97339997 |
| AAGCCCAGGATGATGGGATG | M68 | 45.01 | -1 | NGA | S | 42.38271804 |
| CCACTCCCATAGGAATTTTC | M69 | 1.1 | -1 | NGA | S | 22.198936 |
| CTGAGCCAGGAGAAACGGGC | M70 | 30.01 | -1 | NGA | S | 22.10220861 |
| TACCACATCATCCATATAAC | M71 | 7.13 | -1 | NGA | 5 | 57.55279703 |
| AGCCACCCAAGGCACAGCTT | M72 | 7.39 | -1 | NGA | Core | 94.32532645 |
| CCAGCAAAGAATTGCTTGCC | M73 | 2.07 | -1 | NGA | Core | 9.576011607 |
| GACGACGAGGCAGGTCCCCT | M74 | 20.83 | 1 | NGA | Core | 52.34563921 |
| GACGAGGCAGGTCCCCTAGA | M75 | 0.63 | 1 | NGA | Core | 50.66903111 |
| GGTCTCAATCGCCGCGTCGC | M76 | 23.22 | 1 | NGA | Core | 69.57923585 |
| CTCAATCGCCGCGTCGCAGA | M77 | ND | 1 | NGA | Core | 91.76205062 |
| AGTCCAAGGAATACTAACAT | M78 | 28.77 | -1 | NGA | Pol | 32.01676608 |
| TGTTTTCCAATGAGGATTAA | M79 | 22.75 | -1 | NGA | Pol | 3.320973722 |
| TTTCCACCAGCAATCCTCTG | M80 | 7.42 | 1 | NGA | Pol | 16.18571659 |
| CCCAACAAGGACACCTGGCC | M81 | 2.41 | 1 | NGA | Pol | 15.17007899 |
| ACGCCAACAAGGTAGGAGCT | M82 | 25.55 | 1 | NGA | Pol | 16.0889892 |
| CCTCCACCAATCGCCAGACA | M83 | 8.63 | 1 | NGA | Pol | 0.693212961 |
| CCAATCCTCGAGAAGATTGA | M84 | 0.12 | -1 | NGA | Pol | 21.66693535 |
| TCCCCAATCCTCGAGAAGAT | M85 | 24.44 | -1 | NGA | Pol | 22.10220861 |
| AGGGTCCCCAATCCTCGAGA | M86 | 45.43 | -1 | NGA | Pol | 19.70014509 |
| CTTCTCTCAATTTTCTAGGG | M87 | 21.49 | 1 | NGA | Pol | 82.52458488 |
| CCAGGACAAGTTGGAGGACA | M88 | 15 | -1 | NGA | Pol | 27.63179107 |
| GATAACCAGGACAAGTTGGA | M89 | 50.24 | -1 | NGA | Pol | 18.2814767 |
| CCACCAGCACGGGACCATGC | M90 | 15.43 | 1 | NGA | Pol | 7.818797356 |
| GCTGTACCAAACCTTCGGAC | M91 | 29.59 | 1 | NGA | Pol | 14.23504756 |
| CTCCATGCGACGTGCAGAGG | M92 | 26.43 | -1 | NGA | Pol | 68.99887151 |
| GTGGTCTCCATGCGACGTGC | M93 | 33.81 | -1 | NGA | Pol | 68.4829921 |
| TATGGATGATGTGGTATTGG | M94 | 30.62 | 1 | NGG | Pol | 67.22553603 |
| TGCCAACTGGATCCTGCGCG | M189 | 0.23 | 1 | NGA | X | 72.48105755 |
| GCTGCCAACTGGATCCTGCG | M190 | 36.53 | 1 | NGG | X | 76.28566823 |
| CTGCCAACTGGATCCTGCGC | M191 | 41.43 | 1 | NGG | X | 72.49717878 |
| CGCCCACCGAATGTTGCCCA | E95 | 45.29 | 1 | NGG | X | |
| CTCCTCCCAGTCTTTAAACA | E96 | 0.01 | 1 | NNNRRT | X | |

[0790] Gene editing efficiency was evaluated as follows. For plasmid transfections, a vector encoding guide RNA and a vector encoding a base editor were transiently transfected into HEK293T cells previously transduced with a lentiviral vector comprising the HBV genome. Base editors tested included: ABE, BE4 (FIG. 4B), or a BE4 variant from among the following:

[0791] A3A-BE4 denotes a variant of BE4 where APOBEC-1 is replaced with the sequence of APOBEC-3A; APOBEC-3A (A3A) is described, for example, by Gehrke et al., Nature Biotechnology volume 36, pages 977-982 (2018);

[0792] A3A-BE4-VRQR denotes a variant of BE4 where APOBEC-1 is replaced with the sequence of APOBEC-3A, and Cas9 is replaced with a Cas9 variant comprising V1134, R1217, Q1334, and R1336 (termed SpCas9-VRQR); and

[0793] BE4-VRQR denotes a BE4 variant where Cas9 is replaced with a Cas9 variant comprising V1134, R1217, Q1334, and R1336 (termed SpCas9-VRQR). A summary of the base editors used with specific guides is provided at Table 13.

[0794] Transfection was carried out using a high efficiency, low toxicity DNA transfection reagent (Mirus TransIT293 or Lipofectamine 2000) optimized for Hek293 or HepG2-NTCP cells in a 3:1 ratio using 250 ng of gRNA plasmid and 750 ng of base editor plasmid. For mRNA transfections, HepG2-NTCP cells were transfected with in vitro transcribed base editor mRNA and synthetic gRNA in a 3:1 ratio using lipofectamin Messengermax. After four days for plasmid transfections and two days for RNA transfection, genomic DNA was extracted with a simple lysis buffer of 0.05% SDS, 25 μg/ml proteinase K, and 10 mM Tris pH 8.0, followed by heat inactivation at 85° C. Genomic sites were PCR amplified and sequenced on a MiSeq. Approximately 60% of the guide RNAs tested introduced a stop codon into the HBV genome. Of the 97 guide RNAs tested, 12 had greater than 20% on-target base editing and greater than 15% conservation across all HBV genomes (FIG. 6, Table 15 (M81 and M189 are included in the table, but were used as negative controls)).

TABLE 15
HBV Target Summary

| | Gene | | | | |
|---|---|---|---|---|---|
| Disease | Symbol | gRNA | Editor | Protospacer | PAM |
| HBV | S | M68 | BE4-VRQR or A3A-BE4-VRQR | AAGCCCAGGATGATGGGATG | NGA |
| HBV | S | M67 | BE4-VRQR or A3A-BE4-VRQR | GACACATCCAGCGATAACCA | NGA |
| HBV | S | M66 | BE4-VRQR or A3A-BE4-VRQR | GAGAAGTCCACCACGAGTCT | NGA |
| HBV | Pol | M87 | BE4-VRQR or A3A-BE4-VRQR | CTTCTCTCAATTTTCTAGGG | NGA |
| HBV | Core | M74 | BE4-VRQR or A3A-BE4-VRQR | GACGACGAGGCAGGTCCCCT | NGA |
| HBV | Pol | M81 | BE4-VRQR or A3A-BE4-VRQR | CCCAACAAGGACACCTGGCC | NGA |
| HBV | X | M189 | BE4-VRQR or A3A-BE4-VRQR | TGCCAACTGGATCCTGCGCG | NGA |
| HBV | Pol | M52 | BE4 or A3A-BE4 | TCAATCCCAACAAGGACACC | NGG |
| HBV | Pol | M50 | BE4 or A3A-BE4 | GGGAACAAGATCTACAGCAT | NGG |
| HBV | X | M191 | BE4 or A3A-BE4 | CTGCCAACTGGATCCTGCGC | NGG |
| HBV | X | M190 | BE4 or A3A-BE4 | GCTGCCAACTGGATCCTGCG | NGG |
| HBV | Pol | M94 | ABE | TATGGATGATGTGGTATTGG | NGG |
| HBV | Pre-Core | M40 | BE4 or A3A-BE4 | CCATGCCCCAAAGCCACCCA | NGG |
| HBV | Pre-Core | M39 | BE4 or A3A-BE4 | AAGCCACCCAAGGCACAGCT | NGG |

[0795] Of these 12 guide RNAs, M94 introduced a functional change mutation in the catalytic domain of the HBV polymerase (a D540G substitution). Mutations at this position are known to inhibit priming and elongation activity of the polymerase

### Example 2: Different Base Editors Introduced Alterations in the HBV Genome

[0796] Different base editors (i.e., BE4, BE4-VRQR, A3A-BE4-VRQR, and ABE (TadA7.10) were compared for efficiency and specificity. Base editing efficiency refers to the number of sequencing reads having an edited sequence divided by the total number of sequencing reads analyzed. Base editing specificity refers to the ratio of intended base edits relative to bystander base edits. Base editors and guide RNAs were introduced into cells as described above. Specifically, a subset of the 12 guide RNAs that had at least 20% on-target base editing was tested with BE4 and A3ABE4 base editors. BE4 comprises an APOBEC cytidine deaminase, a Cas9 domain, and two uracil DNA glycosylase inhibitor (UGI) domains, whereas A3A-BE4 comprises an APOBEC3A cytidine deaminase, a Cas9 domain, and two UGI domains. Referring to FIG. 7, the BE4 base editor had better efficiency for each guide RNA and better specificity for the majority of the guide RNAs compared to the base editor comprising an APOBEC3A cytidine deaminase (A3ABE4).

[0797] DNA and RNA constructs encoding the BE4 base editor were introduced into HepG2-NTCP-lenti-HBV cell line along with guide RNAs. Specifically, DNA constructs, wild type RNA constructs, and RNA constructs comprising pseudo-uracil modified at the N1 moiety were tested. Two different amounts (400 ng and 800 ng) of the modified RNA constructs were tested. Each construct generated base editing, but RNA constructs comprising pseudo-uracil appeared to exhibit greater base editing efficiency than did the DNA or wild type RNA constructs (FIGS. 8 and 9).

[0798] The guide RNAs were further tested with BE4, BE4-VRQR, and ABE base editors. RNA constructs comprising pseudo-uracil modified at the N1 moiety and encoding the base editors were introduced into HepG2-NTCP-lenti-HBV cell line along with guide RNAs. Referring to FIG. 10, each base editor exhibited greater than 40% functional editing. Tables 16 and 17 provide potential base editing outcomes for BE4 and ABE base editing systems.

TABLE 16
Characterization of BE4 base editing for guide RNAs selected for introducing functional
change or stop codon

| | | | | Frequency of the anticipated | No. of |
|---|---|---|---|---|---|
| | | | | amino acid change (across the | cytidines |
| | | | Mutations | sequenced HBV proteins, | in base |
| Sequence | | Guide | Introduced by BE4 | according to the Hepatitis B | editing |
| of gRNA | PAM | Id | base editors | Virus database at Hbvdb.ibcp.fr) | window |
| AAGCCACCCA | NGG | M39 | | | 4 |
| AGGCACAGCT | | | | | |
| CCATGCCCCAA | NGG | M40 | | | 3 |
| AGCCACCCA | | | | | |
| GGGAACAAGA | NGG | M50 | Pol: Q177Stop | Pol: 177* = 0.00%, Pol: 177Q = | 1 |
| TCTACAGCAT | | | | 98.74% | |
| TCAATCCCAAC | NGG | M52 | Pol: S216F, Pol: | Pol: 216F = 0.01%, Pol: 216S = | 3 |
| AAGGACACC | | | Q217Stop | 22.91%, Pol: 217* = 0.00%, | |
| | | | | Pol: 217Q = 56.79% | |
| GCTGCCAACT | NGG | M190 | X: Q8Stop, | Pol: 757A = 99.91%, Pol: 757V = | 2 |
| GGATCCTGCG | | | Pol: A757V | 0.00%, X: 8* = 0.00%, | |
| | | | | X: 8Q = 99.25% | |
| CTGCCAACTG | NGG | M191 | X: Q8Stop, | Pol: 757A = 99.91%, Pol: 757V = | 3 |
| GATCCTGCGC | | | Pol: A757V | 0.00%, X: 8* = 0.00%, | |
| | | | | X: 8Q = 99.25% | |
| GACGACGAGG | NGA | M74 | Core: R152Stop | Core: 152* = 0.00%, Core: | 1 |
| CAGGTCCCCT | | | | 152R = 99.59% | |
| CTTCTCTCAAT | NGA | M87 | S: S38F, S: L39F, | Pol: 382F = 0.05%, Pol: 382S = | 3 |
| TTTCTAGGG | | | Pol: S382F, Pol: | 99.86%, Pol: 383* = 0.00%, | |
| | | | Q383Stop | Pol: 383Q = 99.93%, S: 38F = 0.01%, | |
| | | | | S: 38S = 99.93%, S: 39F = 0.04%, | |
| | | | | S: 39L = 99.84% | |
| GAGAAGTCCA | NGA | M66 | S: W36Stop, Pol: | Pol: 380D = 99.88%, Pol: 380N = | 1 |
| CCACGAGTCT | | | D380N | 0.01%, S: 36* = 0.00%, | |
| | | | | S: 36W = 99.55% | |
| GACACATCCA | NGA | M67 | S: W74Stop, S: M75I, | Pol: 418D = 99.93%, Pol: 418N = | 2 |
| GCGATAACCA | | | Pol: D418N, Pol: | 0.01%, Pol: 419M = 0.05%, Pol: | |
| | | | V419M | 419V = 99.85%, S: 74* = 0.00%, | |
| | | | | S: 74W = 99.15%, S: 75I = 0.07%, | |
| | | | | S: 75M = 99.79% | |
| AAGCCCAGGA | NGA | M68 | S: W156Stop, S: | Pol: 500G = 99.91%, Pol: 500N = | 3 |
| TGATGGGATG | | | A157T, Pol: G500N | 0.00%, S: 156* = 0.00%, S: 156W = | |
| | | | | 99.65%, S: 157A = 99.83%, | |
| | | | | S: 157T = 0.02% | |
| CCCAACAAGG | NGA | M81 | Pol: Q218Stop | Pol: 218* = 0.00%, Pol: | 1 |
| ACACCTGGCC | | | | 218Q = 99.00% | |
| TGCCAACTGG | NGA | M189 | X: Q8Stop | X: 8* = 0.00%, X: 8Q = 99.25% | 2 |
| ATCCTGCGCG | | | | | |
| TATGGATGAT | NGG | M94 | | | 0 |
| GTGGTATTGG | | | | | |

TABLE 17
Characterization of ABE base editing for guide RNAs selected for introducing
functional change or stop codon

| | Mutations Introduced by | | No. of cytidines in base |
|---|---|---|---|
| Guide Id | BE4 base editors | Allele Frequencies | editing window |
| M39 | | | 1 |
| M40 | | | 0 |
| M50 | Pol: E176G, Pol: Q177R | Pol: 176E = 99.94%, Pol: 176G = 0.02%, | 4 |
| | | Pol: 177Q = 98.74%, Pol: 177R = 0. | |
| | | 05% | |
| M52 | | | 1 |
| M190 | X: Q8R, Pol: N758G | Pol: 758G = 0.00%, Pol: 758N = 99.78%, | 2 |
| | | X: 8Q = 99.25%, X: 8R = 0.07% | |
| M191 | X: Q8R, Pol: N758G | Pol: 758G = 0.00%, Pol: 758N = 99.78%, | 2 |
| | | X: 8Q = 99.25%, X: 8R = 0.07% | |
| M74 | Pol: D16G, Pol: E17G | Pol: 16D = 69.15%, Pol: 16G = 0.12%, | 2 |
| | | Pol: 17E = 94.58%, Pol: 17G = 0.59% | |
| M87 | | | 0 |
| M66 | S: S38P, Pol: F381P | Pol: 381F = 99.93%, Pol: 381P = 0.00%, | 2 |
| | | S: 38P = 0.04%, S: 38S = 99.93% | |
| M67 | S: M75T,S: C76R, Pol: V419A | Pol: 419A = 0.06%, Pol: 419V = 99.85%, | 2 |
| | | S: 75M = 99.79%, S: 75T = 0.06%, S: | |
| | | 76C = 96.88%, S: 76R = 0.04% | |
| M68 | S: W156R, Pol: L499P | Pol: 499L = 95.19%, Pol: 499P = 0.01%, | 1 |
| | | S: 156R = 0.02%, S: 156W = 99.65% | |
| M81 | Pol: Q217R, Pol: Q218R | Pol: 217Q = 56.79%, Pol: 217R = 0.72%, | 4 |
| | | Pol: 218Q = 99.00%, Pol: 218R = 0.01% | |
| M189 | X: Q8R, Pol: N758G | Pol: 758G = 0.00%, Pol: 758N = 99.78%, | 2 |
| | | X: 8Q = 99.25%, X: 8R = 0.07% | |
| M94 | S: M197V, Pol: D540G | Pol: 540D = 99.94%, Pol: 540G = 0.01%, | 1 |
| | | S: 197M = 99.59%, S: 197V = 0.01% | |

### Example 3: Base Editors were Used to Target Conserved Regions of the HBV Genome

[0799] Base editors were evaluated for their ability to edit conserved regions of the HBV genome (FIG. 11). Table 18 identifies 126 guide RNAs that targeted regions conserved in >80% of 1-HBV A and D genotypes (“super-conserved”) and that were designed to minimize off-target effects (i.e., targeting a human genomic region). These guide RNAs are expected to introduce functional changes based on the high degree of conservation among HBV genomes. Without being bound by theory, targeting deaminase to HBV cccDNA using a base editor (including base editor without UGI has the potential to promote formation of apyrimidinic sites and cccDNA damage and/or degradation. Table 18 provides a list of sequences for guide RNAs that target a base editor to conserved regions of the HBV genome. These guide RNAs target sequences having greater than 50% conservation between HBV genotypes A, B, C and D and having at least one mismatch with the most similar sequence in human genome hg38, thereby minimizing off-target effects.

TABLE 18
Conserved gRNA list

| guide_seq | guide_id | pam |
|---|---|---|
| AAAAACCCCGCCTGTAACAC | Novel | NAG |
| AAAACGCCGCAGACACATCC | Novel | NGC |
| AAAGGCCTTGTAAGTTGGCG | Novel | NGA |
| AAAGGCCTTGTAAGTTGGCGA | Novel | NNNRRT |
| AACCACTGAACAAATGGCAC | Novel | NAG |
| AACCCCGCCTGTAACACGAG | Novel | NAG |
| AACGCCGCAGACACATCCAG | Novel | NGA |
| AAGAAGTCAGAAGGCAAAAA | Novel | NGA |
| AAGCCACCCAAGGCACAGCT | MSPbeam39 | NGG |
| AAGCCCTACGAACCACTGAA | Novel | NAA |
| AAGCCTCCAAGCTGTGCCTT | Novel | NGG |
| AAGGCACAGCTTGGAGGCTT | Novel | NAA |
| AAGGCACAGCTTGGAGGCTTG | EMSbeaml | NNNRRT |
| AAGGCCTTGTAAGTTGGCGA | Novel | NAA |
| AATCGCCGCGTCGCAGAAGAT | Novel | NNNRRT |
| AATGTCAACGACCGACCTTG | Novel | NGG |
| ACAGGCGGGGTTTTTCTTGT | MSPbeam64 | NGA |
| ACCAATTTATGCCTACAGCCT | EMSbeam2 | NNNRRT |
| ACGAACCACTGAACAAATGGC | MSPbeam5 | NNNRRT |
| ACGGGGCGCACCTCTCTTTA | Novel | NGC |
| ACTCCCTCGCCTCGCAGACG | Novel | NAG |
| ACTGAACAAATGGCACTAGT | Novel | NAA |
| ACTTCTCTCAATTTTCTAGG | Novel | NGG |
| ACTTTCTCGCCAACTTACAA | Novel | NGC |
| AGAAAGGCCTTGTAAGTTGG | Novel | NGA |
| AGAAGAACTCCCTCGCCTCG | Novel | NAG |
| AGACAAAAGAAAATTGGTAA | Novel | NAG |
| AGCCACCCAAGGCACAGCTT | MSPbeam72 | NGA |
| AGCCCTACGAACCACTGAAC | Novel | NAA |
| AGCTGTGCCTTGGGTGGCTT | Novel | NGG |
| AGGAGGCTGTAGGCATAAAT | EMSbeam3 | NGG |
| AGGAGTTCCGCAGTATGGAT | EMSbeam4 | NGG |
| AGGCAGGTCCCCTAGAAGAA | Novel | NAA |
| AGGCCTTGTAAGTTGGCGAG | Novel | NAA |
| AGGCGAGGGAGTTCTTCTTC | Novel | NAG |
| AGTCCAAGAGTCCTCTTATG | Novel | NAA |
| AGTTCCGCAGTATGGATCGG | Novel | NAG |
| AGTTCTTCTTCTAGGGGACC | Novel | NGC |
| ATCCATACTGCGGAACTCCT | Novel | NGC |
| ATCTTCTGCGACGCGGCGAT | Novel | NGA |
| ATGTCAACGACCGACCTTGA | Novel | NGC |
| ATTTGTTCAGTGGTTCGTAG | Novel | NGC |
| CAAATGGCACTAGTAAACTG | Novel | NGC |
| CAAGCCTCCAAGCTGTGCCT | EMSbeam5 | NGG |
| CAAGGCACAGCTTGGAGGCT | EMSbeam6 | NGA |
| CACCACGAGTCTAGACTCTG | MSPbeam36 | NGG |
| CACCCAAGGCACAGCTTGGA | Novel | NGC |
| CACTGAACAAATGGCACTAG | Novel | NAA |
| CATACTGCGGAACTCCTAGC | Novel | NGC |
| CATGCAACTTTTTCACCTCTG | MSPbeam8 | NNNRRT |
| CATGCCCCAAAGCCACCCAA | Novel | NGC |
| CCACCCAAGGCACAGCTTGG | MSPbeam38 | NGG |
| CCATGCAACTTTTTCACCTC | Novel | NGC |
| CCATGCCCCAAAGCCACCCA | MSPbeam40 | NGG |
| CCCAAAGCCACCCAAGGCAC | Novel | NGC |
| CCCCAAAGCCACCCAAGGCA | Novel | NAG |
| CCCGTCTGTGCCTTCTCATC | Novel | NGC |
| CCGCAGTATGGATCGGCAGA | EMSbeam7 | NGA |
| CCTACGAACCACTGAACAAA | Novel | NGG |
| CCTCCAAGCTGTGCCTTGGG | Novel | NGG |
| CCTCTGCCGATCCATACTGC | EMSbeam8 | NGA |
| CCTGCTGGTGGCTCCAGTTC | Novel | NGG |
| CGCCGCGTCGCAGAAGATCT | Novel | NAA |
| CGCGTAAAGAGAGGTGCGCCC | Novel | NNNRRT |
| CGTGCAGAGGTGAAGCGAAG | Novel | NGC |
| CTACGAACCACTGAACAAAT | Novel | NGC |
| CTAGACTCGTGGTGGACTTCT | EMSbeam9 | NNNRRT |
| CTCAATCGCCGCGTCGCAGA | MSPbeam77 | NGA |
| CTCCAAGCTGTGCCTTGGGT | Novel | NGC |
| CTCTGCCGATCCATACTGCG | Novel | NAA |
| CTGTGCCTTGGGTGGCTTTG | Novel | NGG |
| CTGTTCAAGCCTCCAAGCTG | Novel | NGC |
| CTTCTCTCAATTTTCTAGGG | MSPbeam87 | NGA |
| CTTCTGCGACGCGGCGATTG | Novel | NGA |
| GAAAAACCCCGCCTGTAACA | Novel | NGA |
| GAAAGCCCTACGAACCACTGA | Novel | NNNRRT |
| GAACTCCCTCGCCTCGCAGAC | EMSbeam10 | NNNRRT |
| GAACTGGAGCCACCAGCAGG | Novel | NAA |
| GAAGAACTCCCTCGCCTCGC | EMSbeam11 | NGA |
| GACAAACGGGCAACATACCTT | Novel | NNNRRT |
| GACTCGTGGTGGACTTCTCT | Novel | NAA |
| GACTTCTCTCAATTTTCTAG | EMSbeam12 | NGG |
| GAGAAGTCCACCACGAGTCT | MSPbeam66 | NGA |
| GAGGACAAACGGGCAACATAC | Novel | NNNRRT |
| GAGGCAGGTCCCCTAGAAGA | Novel | NGA |
| GATCCATACTGCGGAACTCC | Novel | NAG |
| GATTGAGATCTTCTGCGACGC | Novel | NNNRRT |
| GCAACTTTTTCACCTCTGCC | Novel | NAA |
| GCACAGCTTGGAGGCTTGAA | Novel | NAG |
| GCCACCCAAGGCACAGCTTG | Novel | NAG |
| GCGTCAGCAAACACTTGGCA | Novel | NAG |
| GCTGCTATGCCTCATCTTCTT | EMSbeam14 | NNNRRT |
| GCTGTGCCTTGGGTGGCTTT | Novel | NGG |
| GGAAAGCCCTACGAACCACT | Novel | NAA |
| GGACTTCTCTCAATTTTCTA | EMSbeam15 | NGG |
| GGAGTGCGAATCCACACTCC | Novel | NAA |
| GGAGTTCCGCAGTATGGATC | Novel | NGC |
| GGCACTAGTAAACTGAGCCA | Novel | NGA |
| GGCCTTGTAAGTTGGCGAGA | Novel | NAG |
| GGCGGGGTTTTTCTTGTTGAC | Novel | NNGRRT |
| GGCGGGGTTTTTCTTGTTGAC | Novel | NNNRRT |
| GGCGTTCACGGTGGTCTCCA | Novel | NGC |
| GGGAAAGCCCTACGAACCAC | Novel | NGA |
| GGGACTGCGAATTTTGGCCA | Novel | NGA |
| GGGGCGCACCTCTCTTTACG | Novel | NGG |
| GGGTTGCGTCAGCAAACACT | Novel | NGG |
| GGTCACCATATTCTTGGGAA | Novel | NAA |
| GGTGGAGCCCTCAGGCTCAG | Novel | NGC |
| GGTTGCGTCAGCAAACACTT | Novel | NGC |
| GTCACCATATTCTTGGGAAC | Novel | NAG |
| GTCCACCACGAGTCTAGACTC | EMSbeam16/ | NNNRRT |
| | MSPbeam2 | |
| GTCCATGCCCCAAAGCCACC | Novel | NAA |
| GTCCCGTCGGCGCTGAATCC | Novel | NGC |
| GTCGCAGAAGATCTCAATCT | Novel | NGG |
| GTCTGTGCCTTCTCATCTGC | Novel | NGG |
| GTGGACTTCTCTCAATTTTC | Novel | NAG |
| GTTCCGCAGTATGGATCGGC | EMSbeam17 | NGA |
| GTTCCGCAGTATGGATCGGC | Novel | NNAGGA |
| GTTTACTAGTGCCATTTGTT | Novel | NAG |
| GTTTACTAGTGCCATTTGTTC | Novel | NNNRRT |
| TAAAACGCCGCAGACACATC | Novel | NAG |
| TAAAACGCCGCAGACACATCC | EMSbeam18 | NNNRRT |
| TAGGCAGAGGTGAAAAAGTTG | Novel | NNNRRT |
| TCACCATATTCTTGGGAACA | Novel | NGA |
| TCAGTTTACTAGTGCCATTTG | Novel | NNNRRT |
| TCCATGCCCCAAAGCCACCC | Novel | NAG |
| TCCCCCTAGAAAATTGAGAG | Novel | NAG |
| TCCGCAGTATGGATCGGCAG | EMSbeam19 | NGG |
| TCCTCTGCCGATCCATACTG | EMSbeam20 | NGG |
| TCGCAGAAGATCTCAATCTC | Novel | NGG |
| TCTCAATCGCCGCGTCGCAG | Novel | NAG |
| TCTTCTGCGACGCGGCGATT | Novel | NAG |
| TCTTGTTCCCAAGAATATGG | Novel | NGA |
| TGAGATCTTCTGCGACGCGG | Novel | NGA |
| TGAGCCTGAGGGCTCCACCC | Novel | NAA |
| TGAGGCATAGCAGCAGGATG | Novel | NAG |
| TGGACTTCTCTCAATTTTCT | EMSbeam21 | NGG |
| TGGCCAAAATTCGCAGTCCC | Novel | NAA |
| TGGCTTTGGGGCATGGACAT | Novel | NGA |
| TGTGCACTTCGCTTCACCTC | Novel | NGC |
| TGTGCCTTGGGTGGCTTTGG | Novel | NGC |
| TTAGGCAGAGGTGAAAAAGT | Novel | NGC |
| TTCAAGCCTCCAAGCTGTGCC | EMSbeam22/ | NNGRRT |
| | MSPbeam9 | |
| TTCAAGCCTCCAAGCTGTGCC | EMSbeam22 | NNNRRT |
| TTCCCGAGATTGAGATCTTC | Novel | NGC |
| TTCCGCAGTATGGATCGGCA | Novel | NAG |
| TTCGCTTCACCTCTGCACGT | Novel | NGC |
| TTTGCTGACGCAACCCCCAC | EMSbeam23_whb | NGG |

[0800] The guide nucleic acids tested are described in Table 18A (see also FIG. 11).

TABLE 18A
Guide nucleic acids

| | | | | Areas |
|---|---|---|---|---|
| gRNA | Sequence | PAM | CAS | targeted |
| E1 | AAGGCACAGCTTGGAGGCTTG | NNNRRT | SaCas9 | Core |
| E2 | ACCAATTTATGCCTACAGCCT | NNNRRT | SaCas9 | X |
| E3 | AGGAGGCTGTAGGCATAAAT | NGG | SpCas9 | X |
| E4 | AGGAGTTCCGCAGTATGGAT | NGG | SpCas9 | Pol |
| E5 | CAAGCCTCCAAGCTGTGCCT | NGG | SpCas9 | Core |
| E6 | CAAGGCACAGCTTGGAGGCT | NGA | SpCas9 | Core |
| E7 | CCGCAGTATGGATCGGCAGA | NGA | SpCas9 | Pol |
| E8 | CCTCTGCCGATCCATACTGC | NGA | SpCas9 | Pol |
| E9 | CTAGACTCGTGGTGGACTTCT | NNNRRT | SaCas9 | Pol, S |
| E10 | GAACTCCCTCGCCTCGCAGAC | NNNRRT | SaCas9 | Pol, Core |
| E11 | GAAGAACTCCCTCGCCTCGC | NGA | SpCas9 | Pol, Core |
| E12 | GACTTCTCTCAATTTTCTAG | NGG | SpCas9 | Pol, S |
| E13 (M66) | GAGAAGTCCACCACGAGTCT | NGA | SpCas9 | Pol, S |
| E14 | GCTGCTATGCCTCATCTTCTT | NNNRRT | SaCas9 | Pol, S |
| E15 | GGACTTCTCTCAATTTTCTA | NGG | SpCas9 | Pol, S |
| E16 | GTCCACCACGAGTCTAGACTC | NNNRRT | SaCas9 | Pol, S |
| E17 | GTTCCGCAGTATGGATCGGC | NGA | SpCas9 | Pol |
| E18 | TAAAACGCCGCAGACACATCC | NNNRRT | SaCas9 | Pol, S |
| E19 | TCCGCAGTATGGATCGGCAG | NGG | SpCas9 | Pol |
| E20 | TCCTCTGCCGATCCATACTG | NGG | SpCas9 | Pol |
| E21 | TGGACTTCTCTCAATTTTCT | NGG | SpCas9 | Pol, S |
| E22 | TTCAAGCCTCCAAGCTGTGCC | NNGRRT | SaCas9 | Core |
| E22 | TTCAAGCCTCCAAGCTGTGCC | NNNRRT | SaCas9 | Core |
| E23 | TTTGCTGACGCAACCCCCAC | NGG | SpCas9 | Pol |
| E24 | TACTAACATTGAGGTTCCCG | NGA | SpCas9 | Pol, Core |

50,000 HBV-infected cells (pBtx693: cell line transduced with HBV sequence encoding X and Core HBV genes and pBtx536: cell line transduced with HBV sequences encoding Pol and S HBV genes) were plated one day prior to transfection with the guide RNA and a base editor (pBtx448 (BE4), pBtx543 (VRQR-BE4), or pBTx546 (sa-Cas9)). Cells were transfected with 250 ng of guide RNA and 750 ng of the construct encoding the base editor. Culture media was changed 1 and 3 days post-transfection. DNA was isolated from harvested cells, and edited regions were amplified by PCR using 10 μM primers. Each cell in the table identifies the primers used in the amplification reaction (e.g., 1058/ES86), the guide RNA (e.g., E1), and the base editor (e.g., 546). Conditions for the PCR reaction were as follows: an initial step of 98° C. for 30 seconds followed by 30 rounds of 98° C. for 10 seconds, 60° C. for 20 seconds, and 72° C. for 20 seconds, followed by a final step of 72° C. for 5 minutes.

[0801] The amplified products were subsequently sequenced to identify which nucleotides targeted by the guide RNA were edited (i.e., the specificity of the editing), as well as the efficiency of editing. Table 19 is a summary of the base editing efficiency and specificity for each of the guide RNAs listed in Table 20.

TABLE 19
Base editing efficiency and specificity

| | | | | | | | | Avg. |
|---|---|---|---|---|---|---|---|---|
| | Base Position Edited (Bold Rows) | | | | | | | Highest |
| gRNA | % Edit at each position (Rows below) | | | | | | | % Edit |
| E1 | 5 | 7 | 10 | | | | | 10.37 |
| | 0.24 | 17.23 | 4.1 | | | | | |
| | 0.31 | 3.5 | 0.63 | | | | | |
| E2 | 2 | 3 | 13 | 16 | | | | 24.18 |
| | 0 | 0 | 23.17 | 4.32 | | | | |
| | 2.49 | 4.12 | 33.23 | 5.29 | | | | |
| | 0.62 | 1.14 | 16.15 | 2.5 | | | | |
| E3 | 7 | | | | | | | 1.31 |
| | 2.62 | | | | | | | |
| | 0 | | | | | | | |
| E4 | | 8 | 9 | 11 | | | | 54.23 |
| | | 59 | 55.25 | 1.55 | | | | |
| | | 47.73 | 45.42 | 0.45 | | | | |
| | | 55.97 | 51.17 | 1.73 | | | | |
| E5 | 1 | 5 | 6 | 8 | 9 | | | 22.89 |
| | 1.35 | 2.17 | 10.25 | 11.75 | 9.78 | | | |
| | 9.53 | 7.19 | 29.63 | 35.37 | 28.98 | | | |
| | 2.64 | 11.46 | 28.78 | 32.25 | 28.56 | | | |
| E6 | | 6 | 8 | | | | | 36.04 |
| | | 39.98 | 35.13 | | | | | |
| | | 28.63 | 39.09 | | | | | |
| | | 21.92 | 33.91 | | | | | |
| E7 | | 1 | 2 | 4 | 14 | | | 51.29 |
| | | 46.08 | 34.59 | 8.9 | 28.72 | | | |
| | | 56.62 | 44.53 | 10.5 | 37.31 | | | |
| | | 51.17 | 41.05 | 9.7 | 33.93 | | | |
| E8 | | 4 | 7 | 8 | 12 | | | 44.72 |
| | | 44.54 | 13.45 | 13.85 | 13.88 | | | |
| | | 42.28 | 8.85 | 10.45 | 13.28 | | | |
| | | 47.35 | 14.53 | 17.45 | 17.51 | | | |
| E9 | | 1 | 6 | 8 | | | | 4.65 |
| | | 3.64 | 2.63 | 5.87 | | | | |
| | | 2.24 | 1.47 | 4.73 | | | | |
| | | 1.64 | 1.29 | 3.35 | | | | |
| E10 | 4 | 6 | 7 | 8 | 10 | 12 | 13 | 38.72 |
| | 1.01 | 29.15 | 19.25 | 18.69 | 42.17 | 2.12 | 9.14 | |
| | 1.25 | 24.05 | 15.7 | 15.43 | 31.85 | 2.71 | 8.28 | |
| | 1.36 | 29.67 | 19.88 | 20.05 | 42.15 | 2.06 | 8.01 | |
| E11 | | 7 | 9 | 10 | 11 | 13 | | 11.79 |
| | | 9.26 | 13.19 | 5.05 | 3.85 | 4.67 | | |
| | | 6.07 | 10.83 | 4.07 | 2.53 | 3.4 | | |
| | | 8.3 | 11.35 | 4.63 | 3.67 | 4.58 | | |
| E12 | | 3 | 6 | 8 | 10 | | | 43.91 |
| | | 0.33 | 32.61 | 36.17 | 8.22 | | | |
| | | 0.13 | 9.03 | 9.33 | 2.49 | | | |
| | | 0.17 | 11.97 | 86.22 | 2.82 | | | |
| E13 | | | | | | | | 19.47 |
| (M66) | | 8 | 9 | 11 | 12 | | | |
| | | 20.53 | 8.47 | 2.31 | 0.75 | | | |
| | | 26.03 | 9.21 | 1.99 | 0.54 | | | |
| | | 11.84 | 4.79 | 1.52 | 0.42 | | | |
| E14 | | 5 | 10 | 11 | 13 | 16 | | 7.54 |
| | | 0.01 | 0.33 | 2.24 | 5.16 | 4.92 | | |
| | | 0 | 0.67 | 3.17 | 7.04 | 6.61 | | |
| | | 0.01 | 1.3 | 4.84 | 10.41 | 10.3 | | |
| E15 | | 4 | 7 | 9 | 11 | | | 5 |
| | | 1.6 | 4.3 | 3.76 | 2.14 | | | |
| | | 1.79 | 4.57 | 3.52 | 2.2 | | | |
| | | 2.73 | 6.13 | 5.33 | 3.61 | | | |
| E16 | | 3 | 4 | 6 | 7 | 9 | 14 | 28.76 |
| | | 19.79 | 5.81 | 7.58 | 10.3 | 26.74 | 44.32 | |
| | | 20.55 | 7.4 | 7.12 | 7.99 | 25.89 | 38.01 | |
| | | 1.99 | 0.91 | 1.05 | 1.19 | 2.63 | 3.95 | |
| E17 | | 4 | 5 | 7 | 17 | | | |
| | | 57.01 | 55.99 | 13.37 | 1.97 | | | 57.71 |
| | | 55.63 | 51.62 | 12.52 | 4.73 | | | |
| | | 60.48 | 57.62 | 17.93 | 3.82 | | | |
| E18 | | 6 | 8 | 9 | 11 | | | |
| | | 1.68 | 0.52 | 1.52 | 0.34 | | | 10.22 |
| | | 16.99 | 5.23 | 15.96 | 4.49 | | | |
| | | 11.99 | 3.59 | 10.91 | 3.6 | | | |
| E19 | | 2 | 3 | 5 | | | | |
| | | 53.21 | 49.12 | 24.46 | | | | 44.63 |
| | | 38.64 | 35.38 | 18.57 | | | | |
| | | 42.03 | 38.94 | 23.8 | | | | |
| E20 | | 2 | 3 | 5 | 8 | 9 | 13 | |
| | | 5.05 | 5.88 | 52.37 | 19.33 | 19.03 | 16.47 | 50.74 |
| | | 4.83 | 5.64 | 50.42 | 18.55 | 21.86 | 21.38 | |
| | | 5.73 | 7.13 | 49.43 | 13.98 | 16.3 | 21.61 | |
| E21 | | 5 | 8 | 10 | 12 | | | 15.40 |
| | | 6.93 | 8.98 | 5.85 | 2.7 | | | |
| | | 16.16 | 20.1 | 13.3 | 5.95 | | | |
| | | 13.32 | 17.13 | 12.13 | 5.67 | | | |
| E22 | | 3 | 7 | 8 | 10 | 11 | | 0.01 |
| | | 0 | 0 | 0 | 0 | 0 | | |
| | | 0.02 | 0 | 0.01 | 0.01 | 0.02 | | |
| | | 0.02 | 0.01 | 0 | 0.02 | 0.01 | | |
| E23 | | 5 | 9 | | | | | 6.35 |
| | | 3.61 | 1.83 | | | | | |
| | | 8.62 | 3.59 | | | | | |
| | | 6.83 | 3.31 | | | | | |
| E24 | | 3 | 7 | 17 | | | | 47.51 |
| | | 37.98 | 54.1 | 6.99 | | | | |
| | | 34.43 | 49.5 | 6.77 | | | | |
| | | 24.76 | 38.92 | 7.49 | | | | |
| E95 | | 3 | 4 | 5 | 7 | 8 | | 45.29 |
| | | 3.44 | 11.92 | 14.63 | 16.61 | 16.01 | | |
| | | 7.71 | 33.79 | 46.19 | 56.45 | 52.91 | | |
| | | 15.11 | 48.31 | 62.82 | 63.65 | 66.96 | | |
| E96 | | 3 | 4 | 6 | 7 | 8 | | 0.01 |
| | | 0 | 0 | 0 | 0 | 0 | | |
| | | 0.02 | 0.01 | 0 | 0.01 | 0 | | |
| | | 0 | 0 | 0 | 0 | 0 | | |

[0802] Tables 19 and 20 identify substitutions in amino acids, and their frequencies, which would be the result of BE4 and ABE-mediated editing using guide RNAs designed to target super-conserved regions of the HBV genome.

TABLE 20
In silico analysis of the amino acid substitutions resulting from BE4 base editing with
a particular guide RNA selected for targeting conserved regions of HBV genome

| | | | Mutations | Amino acid | No. C |
|---|---|---|---|---|---|
| Guide | | | Introduced by BE4 | substitution | per |
| Sequence | PAM | Guide Id | base editors | Frequencies | window |
| GTTCCGCAGTATGGAT | NGA | E17 | Pol: A717T, | Pol: 717A = 99.79%, Pol: | 3 |
| CGGC | | | Pol: E718K | 717T = 0.02%, Pol: 718E = | |
| | | | | 99.81%, Pol: 718K = 0.05% | |
| AGGAGTTCCGCAGTAT | NGG | E4 | Pol: E718K | Pol: 718E = 99.81%, Pol: | 1 |
| GGAT | | | | 718K = 0.05% | |
| CCGCAGTATGGATCGG | NGA | E7 | Pol: A717T | Pol: 717A = 99.79%, Pol: | 1 |
| CAGA | | | | 717T = 0.02% | |
| TCCTCTGCCGATCCATA | NGG | E20 | Pol: P713S | Pol: 713P = 99.78%, Pol: | 2 |
| CTG | | | | 713S = 0.01% | |
| TACTAACATTGAGGTTC | NGA | E24_splice | Core: C183Y, | Core: 183C = 98.81%, | 1 |
| CCG | | (not | Pol:V48I | Core: 183Y = 0.02%, | |
| | | conserved) | | Pol: 48I = 0.01%, | |
| | | | | Pol: 48V = 99.47% | |
| CGCCCACCGAATGTTG | NGG | E95 (X- | X: H86Y, | X: 86H = 81.50%, | 4 |
| CCCA | | Stop, not | X: R87Stop | X: 86Y = 0.08%, | |
| | | conserved) | | X: 87* = 0.00%, | |
| | | | | X: 87R = 22.91% | |
| CCTCTGCCGATCCATAC | NGA | E8 | Pol: P713L | Pol: 713L = 0.06%, | 3 |
| TGC | | | | Pol: 713P = 99.78% | |
| TCCGCAGTATGGATCG | NGG | E19 | Pol: A717T | Pol: 717A = 99.79%, | 1 |
| GCAG | | | | Pol: 717T = 0.02% | |
| GACTTCTCTCAATTTTCT | NGG | E12 | S: S38F, S: L39F, | Pol: 382F = 0.05%, Pol: | 2 |
| AG | | | Pol: S382F | 382S = 99.86%, S: 38F = | |
| | | | | 0.01%, S: 38S = 99.93%, | |
| | | | | S: 39F = 0.04%, | |
| | | | | S: 39L = 99.84% | |
| GAACTCCCTCGCCTCGC | NNNRRT | E10 | Core: T160I, Core: | Core: 160I = 0.02%, Core: | 5 |
| AGAC | | | P161F, | 160T = 99.81%, Core: | |
| | | | Core: S162L, Pol: | 161F = 0.00%, Core: | |
| | | | L25F, | 161P = 99.82%, Core: | |
| | | | Pol: P26F, Pol: R27C | 162L = 0.03%, Core: 162S = | |
| | | | | 99.85%, Pol: 25F = 0.01%, | |
| | | | | Pol: 25L = 99.84%, Pol: | |
| | | | | 26F = 0.00%, Pol: | |
| | | | | 26P = 99.88%, Pol: 27C = | |
| | | | | 0.02%, Pol: 27 = 98.51% | |
| CAAGGCACAGCTTGGA | NGA | E6 | | | 2 |
| GGCT | | | | | |
| GTCCACCACGAGTCTA | NNNRRT | E16/2 | S: W35Stop, | Pol: 378I = 0.00%, Pol: | 5 |
| GACTC | | | S: W36Stop, Pol: | 378V = 99.80%, Pol: | |
| | | | V378I, Pol: V379I, | 379I = 0.00%, Pol: 379V = | |
| | | | Pol: D380N | 299.86%, Pol: 380D = | |
| | | | | 99.88%, Pol: 380N = 0.01%, | |
| | | | | S: 35* = 0.00%, S: 35W = | |
| | | | | 99.77%, S: 36* = 0.00%, | |
| | | | | S:36W = 99.55% | |
| ACCAATTTATGCCTACA | NNNRRT | E2 | | | 1 |
| GCCT | | | | | |
| CAAGCCTCCAAGCTGT | NGG | E5 | | | 3 |
| GCCT | | | | | |
| GAGAAGTCCACCACGA | NGA | M66/E13 | S: W36Stop, | Pol: 380D = 99.88%, Pol: | 1 |
| GTCT | | | Pol: D380N | 380N = 0.01%, S: 36* = | |
| | | | | 0.00%, S: 36W = 99.55% | |
| TGGACTTCTCTCAATTT | NGG | E21 | S: T37I, S: S38F | S: 37I = 0.02%, S: 37T = | 2 |
| TCT | | | | 99.87%, S: 38F = 0.01%, | |
| | | | | S: 38S = 99.93% | |
| GAAGAACTCCCTCGCCT | NGA | E11 | Core: T160I, | Core: 160I = 20.02%, | 1 |
| CGC | | | Pol: L25F | Core: 160T = 99.81%, | |
| | | | | Pol: 25F = 0.01%, Pol: | |
| | | | | 25L = 99.84% | |
| AAGGCACAGCTTGGAG | NNNRRT | E1 | | | 3 |
| GCTTG | | | | | |
| TAAAACGCCGCAGACA | NNNRRT | E18 | S: R78Q, S: R79H, | Pol: 422A = 99.91%, Pol: | 3 |
| | | | Pol: A422T | 422T = 0.01%, S: 78Q = | |
| CATCC | | | | 0.03%, S: 78R = 99.91%, | |
| | | | | S: 79H = 0.36%, S: 79R = | |
| | | | | 99.38% | |
| GCTGCTATGCCTCATCT | NNNRRT | E14 | Pol: A432V, Pol: | Pol: 432A = 99.51%, Pol: | 2 |
| TCTT | | | P434S | 432V = 0.04%, Pol: 434P = | |
| | | | | 99.89%, Pol: 434S = 0.06% | |
| TTTGCTGACGCAACCCC | NGG | E23 | Pol: A688V | Pol: 688A = 99.75%, Pol: | 1 |
| CAC | | | | 688V = 0.01% | |
| GGACTTCTCTCAATTTT | NGG | E15 | S: T37I, S: S38F | S: 37I = 0.02%, S: 37T = | 2 |
| CTA | | | | 99.87%, S: 38F = 0.01%, | |
| | | | | S: 38S = 99.93% | |
| CTAGACTCGTGGTGGA | NNNRRT | E9 | S: S34L, Pol: L377F | Pol: 377F = 0.01%, Pol: | 2 |
| CTTCT | | | | 377L = 99.91%, S: 34L = | |
| | | | | 0.41%, S: 34S = 99.40% | |
| AGGAGGCTGTAGGCAT | NGG | E3 | | | 1 |
| AAAT | | | | | |
| TTCAAGCCTCCAAGCTG | NNGRRT | E22/9 | | | 4 |
| TGCC | | | | | |
| ACTCCTCCCAGTCTTTA | NNNRRT | E96 | X: W120Stop, | X: 120* = 0.00%, | 5 |
| AACA | | | X: E121K, | X: 120W = 99.79%, | |
| | | | X: E122K | X: 121E = 99.82%, | |
| | | | | X: 121K = 0.04%, | |
| | | | | X: 122E = 99.13%, | |
| | | | | X: 122K = 0.05% | |

TABLE 21
In silico analysis of the amino acid substitutions resulting from ABE base editing with a particular guide RNA
selected for targeting conserved regions of HBV genome

| | Mutations | | Minimum | |
|---|---|---|---|---|
| | Introduced by ABE | | allele | |
| Guide ID | base editors | Allele Frequencies | frequency | No. A per window |
| E17 | | | 100 | 1 |
| E4 | Pol: L719P | Pol: 719L = 99.80%, Pol: 719P = | 0.082362631 | 1 |
| | | 0.08% | | |
| E7 | | | 100 | 2 |
| E20 | | | 100 | 0 |
| E24_splice (not | Core: C183R, Core: | Core: 183C = 98.81%, Core: 183R = | 0.073421439 | 3 |
| conserved) | Stop1840., Pol: V48A | 0.07%, Pol: 48A = 0.22%, Pol: 48V = | | |
| | | 99.47% | | |
| E95 (X-Stop, not | X: H86R | X: 86H = 81.50%, X: 86R = 11.10% | 11.09879032 | 1 |
| conserved) | | | | |
| E8 | | | 100 | 0 |
| E19 | | | 100 | 1 |
| E12 | | | 100 | 0 |
| E10 | Core: T160A | Core: 160A = 0.04%, Core: 160T = | 0.03671072 | 1 |
| | | 99.81% | | |
| E6 | | | 100 | 1 |
| E16/2 | S: W35R, S: W36R, Pol: | Pol: 378A = 0.09%, Pol: 378V = 9 | 0.070596541 | 2 |
| | V378A, Pol: V379A | 9.80%, Pol: 379A = 0.07%, Pol: | | |
| | | 379V = 99.86%, S: 35R = 0.07%, | | |
| | | S: 35W = 99.77%, S: 36R = 0.10%, | | |
| | | S: 36W = 99.55% | | |
| E2 | X: L141P | X: 141L = 99.53%, X: 141P = 0.01% | 0.010080645 | 3 |
| E5 | | | 100 | 0 |
| M66/E13 | S: S38P, Pol: F381P | Pol: 381F = 99.93%, Pol: 381P = | 0 | 2 |
| | | 0.00%, S: 38P = 0.04%, S: 38S = 9 | | |
| | | 9.93% | | |
| E21 | S: 137A, Pol: D380G | Pol: 380D = 99.88%, Pol: 380G = | 0.03529827 | 1 |
| | | 0.04%, S: 37A = 0.06%, S: 371 = | | |
| | | 99.87% | | |
| E11 | Core: T160A, Pol: E24G | Core: 160A = 0.04%, Core: 160T = | 0.03671072 | 2 |
| | | 99.81%, Pol: 24E = 99.75%, | | |
| | | Pol: 24G = 0.11% | | |
| E1 | | | 100 | 2 |
| E18 | S: F80P, Pol: F423P | Pol: 423F = 99.84%, Pol: 423P = | 0 | 3 |
| | | 0.00%, S: 80F = 99.26%, S: 80P = | | |
| | | 0.00% | | |
| E14 | Pol: M433V | Pol: 433M = 99.88%, Pol: 433V = | 0.02353218 | 1 |
| | | 0.02% | | |
| E23_whb | Pol: D689G | Pol: 689D = 99.87%, Pol: 689G = | 0.02353218 | 1 |
| | | 0.02% | | |
| E15 | | | 100 | 0 |
| E9 | S: D33G, Pol: R376G | Pol: 376G = 0.02%, Pol: 376R = | 0.02353218 | 2 |
| | | 99.85%, S: 33D = 99.75%, S: 33G = | | |
| | | 0.08% | | |
| E3 | | | 100 | 1 |
| E22/9 | | | 100 | 2 |
| E96 | X: W120R | X: 120R = 0.13%, X: 120W = 99.79% | 0.131048387 | 1 |
| | | | 100 | 2 |

### Example 4: Additional gRNAs were Contemplated for Targeting HBV

[0803] Table 22 provides a list of sequences targeted by guide RNAs designed to introduce missense mutations in the HBV genome using an ABE base editor. The sequences targeted by the guide RNAs were at least 50% conserved between HBV genotypes A and D. Amino acid substitutions which would result from application of gRNA and ABE were analyzed in silico, and we further selected those gRNAs that would generate amino acid substitution that occur in less than 0.05% of known sequenced HBV genes. That would imply that the base editing with the selected gRNA would lead to a misfunctional HBV protein.

TABLE 22
ABE gRNA Functional List

| guide_seq | guide_id | pam |
|---|---|---|
| AAAAACCCCGCCTGTAACAC | Novel | NAG |
| AAAAAGTTGCATGGTGCTGG | Novel | NGC |
| AAAACAAGCGGCTAGGAGTTC | Novel | NNNRRT |
| AAAACGCCGCAGACACATCC | Novel | NGC |
| AAACAAGCGGCTAGGAGTTC | Novel | NGC |
| AAAGAATTTGGAGCTACTGT | Novel | NGA |
| AAAGCCAAACAGTGGGGGAA | Novel | NGC |
| AAATTGAGAGAAGTCCACCA | Novel | NGA |
| AACAAATGGCACTAGTAAAC | Novel | NGA |
| AACAAGAAAAACCCCGCCTG | Novel | NAA |
| AACAGTGGGGGAAAGCCCTA | Novel | NGA |
| AACATCACATCAGGATTCCT | Novel | NGG |
| AACATGGAGAACATCACATC | Novel | NGG |
| AACCACTGAACAAATGGCAC | Novel | NAG |
| AACCCCCACTGGCTGGGGCT | Novel | NGG |
| AAGAAGATGAGGCATAGCAG | Novel | NAG |
| AAGAAGTCAGAAGGCAAAAA | Novel | NGA |
| AAGAAGTCAGAAGGCAAAAAC | Novel | NNGRRT |
| AAGAAGTCAGAAGGCAAAAAC | Novel | NNNRRT |
| AAGAATCCTCACAATACCGC | Novel | NGA |
| AAGAATTTGGAGCTACTGTG | Novel | NAG |
| AAGGAAAGAAGTCAGAAGGC | Novel | NAA |
| AATGTCAACGACCGACCTTG | Novel | NGG |
| AATTGAGAGAAGTCCACCAC | Novel | NAG |
| ACAAATGGCACTAGTAAACT | Novel | NAG |
| ACAAGAATCCTCACAATACCG | Novel | NNGRRT |
| ACAAGAATCCTCACAATACCG | Novel | NNNRRT |
| ACACATCCAGCGATAACCAGG | M3 | NNNRRT |
| ACAGGAGGTTGGTGAGTGAT | Novel | NGG |
| ACAGGAGGTTGGTGAGTGATT | Novel | NNNRRT |
| ACAGTGGGGGAAAGCCCTAC | Novel | NNACCA |
| ACATGGAGAACATCACATCA | Novel | NGA |
| ACATTTAAACCCTAACAAAA | Novel | NAA |
| ACCAATTTATGCCTACAGCCT | E2 | NNNRRT |
| ACGAACCACTGAACAAATGGC | M5 | NNNRRT |
| ACGCAACCCCCACTGGCTGG | Novel | NGC |
| ACTGAACAAATGGCACTAGT | Novel | NAA |
| AGAAAGGCCTTGTAAGTTGG | Novel | NGA |
| AGAACATCACATCAGGATTC | Novel | NNAGGA |
| AGAAGAACTCCCTCGCCTCG | Novel | NAG |
| AGAAGATGAGGCATAGCAGC | Novel | NGG |
| AGAAGGGGACGAGAGAGTCC | Novel | NAA |
| AGACAAAAGAAAATTGGTAA | Novel | NAG |
| AGACAAAAGAAAATTGGTAAC | Novel | NNNRRT |
| AGACACATCCAGCGATAACC | Novel | NGG |
| AGACGGAGAAGGGGACGAGA | Novel | NAG |
| AGAGAAGTCCACCACGAGTC | Novel | NAG |
| AGAGAGGTGCGCCCCGTGGT | Novel | NGG |
| AGATGAGAAGGCACAGACGG | Novel | NGA |
| AGCGCCGACGGGACGTAAAC | Novel | NAA |
| AGCGCCGACGGGACGTAAAC | Novel | NNAGGA |
| AGCTCCAAATTCTTTATAAGG | Novel | NNNRRT |
| AGGAAAGAAGTCAGAAGGCA | Novel | NAA |
| AGGAGGTTGGTGAGTGATTG | Novel | NAG |
| AGGCAAAAACGAGAGTAACTC | Novel | NNNRRT |
| AGGCATAGCAGCAGGATGAA | Novel | NAG |
| AGGGTTTAAATGTATACCCA | Novel | NAG |
| AGGTATGTTGCCCGTTTGTCC | Novel | NNNRRT |
| AGTAACTCCACAGTAGCTCC | Novel | NAA |
| AGTCCAAGGAATACTAACAT | M78 | NGA |
| AGTCCCCAACCTCCAATCAC | Novel | NNACCA |
| AGTGATTGGAGGTTGGGGACT | Novel | NNGRRT |
| AGTGATTGGAGGTTGGGGACT | Novel | NNNRRT |
| AGTGCGAATCCACACTCCGA | Novel | NAG |
| AGTGTGGATTCGCACTCCTC | Novel | NAG |
| ATAAAGAATTTGGAGCTACTG | Novel | NNGRRT |
| ATAAAGAATTTGGAGCTACTG | Novel | NNNRRT |
| ATAAATTGGTCTGCGCACCA | Novel | NNACCA |
| ATATGGATGATGTGGTATTG | Novel | NGG |
| ATCCATACTGCGGAACTCCT | Novel | NGC |
| ATGAGGCATAGCAGCAGGAT | Novel | NAA |
| ATGATGTGGTATTGGGGGCC | Novel | NAG |
| ATGGATGATGTGGTATTGGG | Novel | NGC |
| ATGGGATGGGAATACAGGTG | Novel | NAA |
| ATGTCAACGACCGACCTTGA | Novel | NGC |
| ATTCAGCGCCGACGGGACGT | Novel | NAA |
| ATTGTGAGGATTCTTGTCAA | Novel | NAA |
| ATTTAAACCCTAACAAAACAA | Novel | NNNRRT |
| CAAAAACGAGAGTAACTCCA | Novel | NAG |
| CAAAAGAAAATTGGTAACAG | Novel | NGG |
| CAAAATTCGCAGTCCCCAACC | Novel | NNNRRT |
| CAAATGGCACTAGTAAACTG | Novel | NGC |
| CAAGAATCCTCACAATACCG | Novel | NAG |
| CAATACCGCAGAGTCTAGACT | M1 | NNNRRT |
| CACCACGAGTCTAGACTCTG | M36 | NGG |
| CACTGAACAAATGGCACTAG | Novel | NAA |
| CAGACACATCCAGCGATAAC | Novel | NAG |
| CAGACGGAGAAGGGGACGAG | Novel | NGA |
| CAGGAGGTTGGTGAGTGATT | Novel | NGA |
| CATAAATTGGTCTGCGCACC | Novel | NGC |
| CATACTGCGGAACTCCTAGC | Novel | NGC |
| CATTTAAACCCTAACAAAAC | Novel | NAA |
| CCCAACCTCCAATCACTCAC | Novel | NAA |
| CCCGAGATTGAGATCTTCTG | Novel | NGA |
| CCCTAGAAGAAGAACTCCCT | Novel | NGC |
| CCTACGAACCACTGAACAAA | Novel | NGG |
| CCTAGAAAATTGAGAGAAGT | Novel | NNACCA |
| CCTCACAATACCGCAGAGTC | Novel | NAG |
| CCTGAACTGGAGCCACCAGC | Novel | NGG |
| CGAATTTTGGCCAAGACACA | Novel | NGG |
| CGAGCAAAACAAGCGGCTAG | Novel | NAG |
| CGCAGAAGATCTCAATCTCG | Novel | NGA |
| CGCAGACCAATTTATGCCTA | Novel | NAG |
| CGCAGAGTCTAGACTCGTGG | M35 | NGG |
| CGCCGACGGGACGTAAACAA | Novel | NGG |
| CGCGTAAAGAGAGGTGCGCCC | Novel | NNNRRT |
| CGTGCAGAGGTGAAGCGAAG | Novel | NGC |
| CTACGAACCACTGAACAAAT | Novel | NGC |
| CTAGACTCGTGGTGGACTTCT | E9 | NNNRRT |
| CTCAATCGCCGCGTCGCAGA | M77 | NGA |
| CTCACAATACCGCAGAGTCT | Novel | NGA |
| CTCACCAACCTCCTGTCCTC | Novel | NAA |
| CTGAAAGCCAAACAGTGGGG | Novel | NAA |
| CTGAACTGGAGCCACCAGCAG | Novel | NNNRRT |
| CTGACGCAACCCCCACTGGC | Novel | NGG |
| CTGCGAGCAAAACAAGCGGCT | Novel | NNGRRT |
| CTGCGAGCAAAACAAGCGGCT | Novel | NNNRRT |
| CTGTGCCAAGTGTTTGCTGA | Novel | NGC |
| CTTGTAAGTTGGCGAGAAAG | Novel | NGA |
| CTTGTCAACAAGAAAAACCC | Novel | NGC |
| CTTGTTGACAAGAATCCTCA | Novel | NAA |
| GAAAAACCCCGCCTGTAACA | Novel | NGA |
| GAAAATTGAGAGAAGTCCACC | Novel | NNGRRT |
| GAAAATTGAGAGAAGTCCACC | Novel | NNNRRT |
| GAAAATTGGTAACAGCGGTA | Novel | NAA |
| GAAAGCCAAACAGTGGGGGA | Novel | NAG |
| GAAAGCCCTACGAACCACTGA | Novel | NNNRRT |
| GAACATCACATCAGGATTCC | Novel | NAG |
| GAACATGGAGAACATCACAT | Novel | NAG |
| GAACTCCCTCGCCTCGCAGAC | E10 | NNNRRT |
| GAAGAACTCCCTCGCCTCGC | E11 | NGA |
| GAAGAAGAACTCCCTCGCCT | Novel | NGC |
| GAAGATGAGGCATAGCAGCA | Novel | NGA |
| GAAGGAAAGAAGTCAGAAGG | Novel | NAA |
| GACAAAAGAAAATTGGTAAC | Novel | NGC |
| GACAAACGGGCAACATACCT | Novel | NGA |
| GACAAACGGGCAACATACCTT | Novel | NNNRRT |
| GACAAGAATCCTCACAATAC | Novel | NGC |
| GACACATCCAGCGATAACCA | M67 | NGA |
| GACGCAACCCCCACTGGCTG | Novel | NGG |
| GACGTAAACAAAGGACGTCC | Novel | NGC |
| GAGAAGTCCACCACGAGTCT | M66 | NGA |
| GAGAGTAACTCCACAGTAGCT | Novel | NNNRRT |
| GAGGACAAACGGGCAACATAC | Novel | NNNRRT |
| GAGGACAGGAGGTTGGTGAG | Novel | NGA |
| GAGGCATAGCAGCAGGATGA | Novel | NGA |
| GAGGCATAGCAGCAGGATGA | Novel | NNAGGA |
| GAGGTGAAAAAGTTGCATGG | Novel | NGC |
| GAGGTGAAAAAGTTGCATGGT | Novel | NNNRRT |
| GAGGTGAAGCGAAGTGCACA | Novel | NGG |
| GAGTAACTCCACAGTAGCTC | Novel | NAA |
| GAGTCCAAGGAATACTAACAT | Novel | NNNRRT |
| GATCCATACTGCGGAACTCC | Novel | NAG |
| GATGAGAAGGCACAGACGGG | Novel | NAG |
| GATGAGGCATAGCAGCAGGA | Novel | NGA |
| GATGATGTGGTATTGGGGGC | Novel | NAA |
| GATTCAGCGCCGACGGGACG | Novel | NAA |
| GATTGGAGGTTGGGGACTGC | Novel | NAA |
| GCAAACACTTGGCACAGACC | Novel | NGG |
| GCAACTTTTTCACCTCTGCC | Novel | NAA |
| GCAGAAGATCTCAATCTCGG | Novel | NAA |
| GCAGACACATCCAGCGATAA | Novel | NNAGGA |
| GCAGACCAATTTATGCCTAC | Novel | NGC |
| GCAGAGTCTAGACTCGTGGT | M65 | NGA |
| GCATAAATTGGTCTGCGCAC | Novel | NAG |
| GCCCAAGGTCTTACATAAGA | Novel | NGA |
| GCCGACGGGACGTAAACAAA | Novel | NGA |
| GCCGCAGACACATCCAGCGA | Novel | NAA |
| GCCGCAGACACATCCAGCGA | Novel | NNACCA |
| GCGAATCCACACTCCGAAAG | Novel | NNACCA |
| GCGAGCAAAACAAGCGGCTA | Novel | NGA |
| GCGCCGACGGGACGTAAACA | Novel | NAG |
| GCTGCTATGCCTCATCTTCTT | E14 | NNNRRT |
| GGAAAGAAGTCAGAAGGCAA | Novel | NAA |
| GGAAAGCCCTACGAACCACT | Novel | NAA |
| GGCACTAGTAAACTGAGCCA | Novel | NGA |
| GGCAGACGGAGAAGGGGACGA | Novel | NNGRRT |
| GGCAGACGGAGAAGGGGACGA | Novel | NNNRRT |
| GGCATAGCAGCAGGATGAAG | Novel | NGG |
| GGCGTTCACGGTGGTCTCCA | Novel | NGC |
| GGGAAAGCCCTACGAACCAC | Novel | NGA |
| GGGACTGCGAATTTTGGCCA | Novel | NGA |
| GGGGACTGCGAATTTTGGCC | Novel | NAG |
| GGGGCATTTGGTGGTCTATA | Novel | NGC |
| GGGGCGCACCTCTCTTTACG | Novel | NGG |
| GGTATACATTTAAACCCTAA | Novel | NAA |
| GGTGAGTGATTGGAGGTTGG | Novel | NGA |
| GTAAACAAAGGACGTCCCGC | Novel | NNAGGA |
| GTAAACAAAGGACGTCCCGCG | Novel | NNGRRT |
| GTAAACAAAGGACGTCCCGCG | Novel | NNNRRT |
| GTAGGCATAAATTGGTCTGC | Novel | NNACCA |
| GTATACATTTAAACCCTAAC | Novel | NAA |
| GTCCAAGGAATACTAACATT | Novel | NAG |
| GTCCATGCCCCAAAGCCACC | Novel | NAA |
| GTCGCAGAAGATCTCAATCT | Novel | NGG |
| GTCTAGACTCTGCGGTATTG | Novel | NGA |
| GTCTAGACTCTGCGGTATTG | Novel | NNAGGA |
| GTCTAGACTCTGCGGTATTGT | Novel | NNGRRT |
| GTCTAGACTCTGCGGTATTGT | Novel | NNNRRT |
| GTGAAAAAGTTGCATGGTGC | Novel | NGG |
| GTGAGGATTCTTGTCAACAA | Novel | NAA |
| GTGCCAAGTGTTTGCTGACG | Novel | NAA |
| GTGCGAATCCACACTCCGAA | Novel | NGA |
| GTGGACTTCTCTCAATTTTC | Novel | NAG |
| GTGTGGATTCGCACTCCTCC | Novel | NGC |
| GTTAATCATTACTTCCAAAC | Novel | NAG |
| GTTACCAATTTTCTTTTGTCT | Novel | NNGRRT |
| GTTACCAATTTTCTTTTGTCT | Novel | NNNRRT |
| GTTAGTATTCCTTGGACTCA | Novel | NAA |
| GTTGGTGAGTGATTGGAGGT | Novel | NGG |
| GTTTACGTCCCGTCGGCGCT | Novel | NAA |
| GTTTACTAGTGCCATTTGTT | Novel | NAG |
| GTTTACTAGTGCCATTTGTTC | Novel | NNNRRT |
| TAAAACGCCGCAGACACATC | Novel | NAG |
| TAAAACGCCGCAGACACATCC | E18 | NNNRRT |
| TAAACAAAGGACGTCCCGCG | Novel | NAG |
| TAAAGAATTTGGAGCTACTG | Novel | NGG |
| TACTAGTGCCATTTGTTCAG | Novel | NGG |
| TAGCAGCAGGATGAAGAGGAA | Novel | NNNRRT |
| TATACATTTAAACCCTAACA | Novel | NAA |
| TATATGGATGATGTGGTATT | Novel | NGG |
| TATGGATGATGTGGTATTGG | M94 | NGG |
| TCACCATATTCTTGGGAACA | Novel | NGA |
| TCAGTTTACTAGTGCCATTTG | Novel | NNNRRT |
| TCCATGCCCCAAAGCCACCC | Novel | NAG |
| TCCTGAACTGGAGCCACCAG | Novel | NAG |
| TCGCAGAAGATCTCAATCTC | Novel | NGG |
| TCTAGACTCTGCGGTATTGT | Novel | NAG |
| TCTCAATCGCCGCGTCGCAG | Novel | NAG |
| TGAAAGCCAAACAGTGGGGG | Novel | NAA |
| TGACGCAACCCCCACTGGCT | Novel | NGG |
| TGAGGCATAGCAGCAGGATG | Novel | NAG |
| TGATTGGAGGTTGGGGACTG | Novel | NGA |
| TGCCCAAGGTCTTACATAAG | Novel | NGG |
| TGGACTTCTCTCAATTTTCT | E21 | NGG |
| TGGATGATGTGGTATTGGGGG | Novel | NNNRRT |
| TGGCCAAAATTCGCAGTCCC | Novel | NAA |
| TGGGGACTGCGAATTTTGGC | Novel | NAA |
| TGGTGAGTGATTGGAGGTTG | Novel | NGG |
| TGTAAGTTGGCGAGAAAGTG | Novel | NAA |
| TGTAGGCATAAATTGGTCTG | Novel | NGC |
| TGTGAGGATTCTTGTCAACA | Novel | NGA |
| TGTGCACTTCGCTTCACCTC | Novel | NGC |
| TGTGGAGTTACTCTCGTTTT | Novel | NGC |
| TGTTAGTATTCCTTGGACTCA | Novel | NNNRRT |
| TGTTTACGTCCCGTCGGCGC | Novel | NGA |
| TTAAACCCTAACAAAACAAA | Novel | NAG |
| TTCCCCCACTGTTTGGCTTT | Novel | NAG |
| TTCCCGAGATTGAGATCTTC | Novel | NGC |
| TTGCTGACGCAACCCCCACT | Novel | NGC |
| TTGGAGGACAGGAGGTTGGTG | Novel | NNNRRT |
| TTGGTGAGTGATTGGAGGTT | Novel | NGG |
| TTGTAAGTTGGCGAGAAAGT | Novel | NAA |
| TTGTGAGGATTCTTGTCAAC | Novel | NAG |
| TTTGCTGACGCAACCCCCAC | E23_whb | NGG |
| TTTGTTTACGTCCCGTCGGCG | Novel | NNGRRT |
| TTTGTTTACGTCCCGTCGGCG | Novel | NNNRRT |

Table 23 provides a list of guide RNAs that introduce missense mutations in the HBV genome using a BE4 base editor. The sequences of the guide RNAs were at least 5000 conserved between HBV genotypes A and D. Amino acid substitutions which would result from application of gRNA and BE4 were analyzed in silico, and we further selected those gRNAs that would generate amino acid substitution that occur in less than 0.05% of known sequenced HBV genes. That would imply that the base editing with the selected gRNA would lead to a misfunctional HBV protein.

TABLE 23
BE4 gRNA Functional list

| guide_seq | guide id | pam |
|---|---|---|
| AAAAACCCCGCCTGTAACAC | Novel | NAG |
| AAAACAAGCGGCTAGGAGTTC | Novel | NNNRRT |
| AAAACGCCGCAGACACATCC | Novel | NGC |
| AAACAAGCGGCTAGGAGTTC | Novel | NGC |
| AAAGCCAAACAGTGGGGGAA | Novel | NGC |
| AACCACTGAACAAATGGCAC | Novel | NAG |
| AACCCCCACTGGCTGGGGCT | Novel | NGG |
| AACCCCGCCTGTAACACGAG | Novel | NAG |
| AACGCCGCAGACACATCCAG | Novel | NGA |
| AAGAAGTCAGAAGGCAAAAA | Novel | NGA |
| AAGAAGTCAGAAGGCAAAAAC | Novel | NNGRRT |
| AAGAAGTCAGAAGGCAAAAAC | Novel | NNNRRT |
| AAGAATCCTCACAATACCGC | Novel | NGA |
| AAGCCCCAGCCAGTGGGGGT | Novel | NGC |
| AAGCCCTACGAACCACTGAA | Novel | NAA |
| AAGGGGACGAGAGAGTCCCA | Novel | NGC |
| AAGTCAGAAGGCAAAAACGA | Novel | NAG |
| AATCGCCGCGTCGCAGAAGAT | Novel | NNNRRT |
| AATTCGCAGTCCCCAACCTC | Novel | NAA |
| ACAAGAATCCTCACAATACCG | Novel | NNGRRT |
| ACAAGAATCCTCACAATACCG | Novel | NNNRRT |
| ACAAGCGGCTAGGAGTTCCG | Novel | NAG |
| ACACATCCAGCGATAACCAGG | M3 | NNNRRT |
| ACAGGCGGGGTTTTTCTTGT | M64 | NGA |
| ACATCCAGCGATAACCAGGA | Novel | NAA |
| ACGAACCACTGAACAAATGGC | M5 | NNNRRT |
| ACGCAACCCCCACTGGCTGG | Novel | NGC |
| ACGGGGCGCACCTCTCTTTA | Novel | NGC |
| ACTCCCTCGCCTCGCAGACG | Novel | NAG |
| ACTGAACAAATGGCACTAGT | Novel | NAA |
| ACTTCTCTCAATTTTCTAGG | Novel | NGG |
| ACTTTCTCGCCAACTTACAA | Novel | NGC |
| AGAAGAACTCCCTCGCCTCG | Novel | NAG |
| AGAAGTCAGAAGGCAAAAAC | Novel | NAG |
| AGAATCCTCACAATACCGCA | Novel | NAG |
| AGACACATCCAGCGATAACC | Novel | NGG |
| AGCCCTACGAACCACTGAAC | Novel | NAA |
| AGCGCCGACGGGACGTAAAC | Novel | NAA |
| AGCGCCGACGGGACGTAAAC | Novel | NNAGGA |
| AGCGGCTAGGAGTTCCGCAGT | Novel | NNGRRT |
| AGCGGCTAGGAGTTCCGCAGT | Novel | NNNRRT |
| AGCTCCAAATTCTTTATAAGG | Novel | NNNRRT |
| AGGAGTTCCGCAGTATGGAT | E4 | NGG |
| AGGCATAGCAGCAGGATGAA | Novel | NAG |
| AGGGCTTTCCCCCACTGTTT | Novel | NGC |
| AGTAACTCCACAGTAGCTCC | Novel | NAA |
| AGTAGCTCCAAATTCTTTAT | Novel | NAG |
| AGTCCAAGAGTCCTCTTATG | Novel | NAA |
| AGTCCAAGGAATACTAACAT | M78 | NGA |
| AGTCCCCAACCTCCAATCAC | Novel | NNACCA |
| AGTTCCGCAGTATGGATCGG | Novel | NAG |
| ATCCATACTGCGGAACTCCT | Novel | NGC |
| ATGAGGCATAGCAGCAGGAT | Novel | NAA |
| ATTCCTTGGACTCATAAGGT | Novel | NGG |
| ATTTAAACCCTAACAAAACAA | Novel | NNNRRT |
| ATTTGTTCAGTGGTTCGTAG | Novel | NGC |
| CAAAATTCGCAGTCCCCAACC | Novel | NNNRRT |
| CAAGAATCCTCACAATACCG | Novel | NAG |
| CAATACCGCAGAGTCTAGACT | M1 | NNNRRT |
| CAATGCTCAGGAGACTCTAA | Novel | NGC |
| CACCACGAGTCTAGACTCTG | M36 | NGG |
| CACTGAACAAATGGCACTAG | Novel | NAA |
| CAGACACATCCAGCGATAAC | Novel | NAG |
| CAGCCAGTGGGGGTTGCGTC | Novel | NGC |
| CAGCGCCGACGGGACGTAAA | Novel | NAA |
| CAGTAGCTCCAAATTCTTTA | Novel | NAA |
| CAGTAGCTCCAAATTCTTTAT | Novel | NNGRRT |
| CAGTAGCTCCAAATTCTTTAT | Novel | NNNRRT |
| CATAGCAGCAGGATGAAGAG | Novel | NAA |
| CCAGCCAGTGGGGGTTGCGT | Novel | NAG |
| CCGCAGTATGGATCGGCAGA | E7 | NGA |
| CCGTGTGTCTTGGCCAAAATT | Novel | NNNRRT |
| CCTACGAACCACTGAACAAA | Novel | NGG |
| CCTCACAATACCGCAGAGTC | Novel | NAG |
| CCTTGGACTCATAAGGTGGG | Novel | NAA |
| CGAGCAAAACAAGCGGCTAG | Novel | NAG |
| CGCAGACCAATTTATGCCTA | Novel | NAG |
| CGCCGCGTCGCAGAAGATCT | Novel | NAA |
| CGCGTAAAGAGAGGTGCGCCC | Novel | NNNRRT |
| CGGCTAGGAGTTCCGCAGTA | Novel | NGG |
| CGTCAGCAAACACTTGGCAC | Novel | NGA |
| CGTGTGTCTTGGCCAAAATT | Novel | NGC |
| CTACGAACCACTGAACAAAT | Novel | NGC |
| CTAGACTCGTGGTGGACTTCT | E9 | NNNRRT |
| CTAGCCGCTTGTTTTGCTCG | Novel | NAG |
| CTCACCAACCTCCTGTCCTC | Novel | NAA |
| CTCTCGTCCCCTTCTCCGTC | Novel | NGC |
| CTGAAAGCCAAACAGTGGGG | Novel | NAA |
| CTGACGCAACCCCCACTGGC | Novel | NGG |
| CTGCGAGCAAAACAAGCGGC | Novel | NAG |
| CTGCGAGCAAAACAAGCGGCT | Novel | NNGRRT |
| CTGCGAGCAAAACAAGCGGCT | Novel | NNNRRT |
| CTGTGCCAAGTGTTTGCTGA | Novel | NGC |
| CTTCTCTCAATTTTCTAGGG | M87 | NGA |
| CTTCTGCGACGCGGCGATTG | Novel | NGA |
| GAAAAACCCCGCCTGTAACA | Novel | NGA |
| GAAAGCCAAACAGTGGGGGA | Novel | NAG |
| GAAAGCCCTACGAACCACTGA | Novel | NNNRRT |
| GAACTCCCTCGCCTCGCAGAC | E10 | NNNRRT |
| GAACTCCTAGCCGCTTGTTT | Novel | NGC |
| GAAGAACTCCCTCGCCTCGC | E11 | NGA |
| GAAGTCAGAAGGCAAAAACG | Novel | NGA |
| GACAAACGGGCAACATACCT | Novel | NGA |
| GACAAACGGGCAACATACCTT | Novel | NNNRRT |
| GACACATCCAGCGATAACCA | M67 | NGA |
| GACGCAACCCCCACTGGCTG | Novel | NGG |
| GACTTCTCTCAATTTTCTAG | E12 | NGG |
| GAGAAGTCCACCACGAGTCT | M66 | NGA |
| GAGCCTGAGGGCTCCACCCC | Novel | NAA |
| GAGGACAAACGGGCAACATAC | Novel | NNNRRT |
| GAGGACAGGAGGTTGGTGAG | Novel | NGA |
| GAGGCATAGCAGCAGGATGA | Novel | NGA |
| GAGGCATAGCAGCAGGATGA | Novel | NNAGGA |
| GAGTCCAAGGAATACTAACAT | Novel | NNNRRT |
| GATCCATACTGCGGAACTCC | Novel | NAG |
| GATGAGGCATAGCAGCAGGA | Novel | NGA |
| GCAAACACTTGGCACAGACC | Novel | NGG |
| GCAGACACATCCAGCGATAA | Novel | NNAGGA |
| GCAGACCAATTTATGCCTAC | Novel | NGC |
| GCAGAGTCTAGACTCGTGGT | M65 | NGA |
| GCATAGCAGCAGGATGAAGA | Novel | NGA |
| GCCGCAGACACATCCAGCGA | Novel | NAA |
| GCCGCAGACACATCCAGCGA | Novel | NNACCA |
| GCGAATCCACACTCCGAAAG | Novel | NNACCA |
| GCGAGCAAAACAAGCGGCTA | Novel | NGA |
| GCGCCGACGGGACGTAAACA | Novel | NAG |
| GCGTCAGCAAACACTTGGCA | Novel | NAG |
| GCTCAGGAGACTCTAAGGCTT | Novel | NNNRRT |
| GCTCCTCTGCCGATCCATAC | Novel | NGC |
| GCTGCGAGCAAAACAAGCGG | Novel | NNAGGA |
| GCTGCTATGCCTCATCTTCTT | E14 | NNNRRT |
| GGACTTCTCTCAATTTTCTA | E15 | NGG |
| GGAGTTCCGCAGTATGGATC | Novel | NGC |
| GGCACTAGTAAACTGAGCCA | Novel | NGA |
| GGCATAGCAGCAGGATGAAG | Novel | NGG |
| GGCGGGGTTTTTCTTGTTGAC | Novel | NNGRRT |
| GGCGGGGTTTTTCTTGTTGAC | Novel | NNNRRT |
| GGGACTGCGAATTTTGGCCA | Novel | NGA |
| GGGGACTGCGAATTTTGGCC | Novel | NAG |
| GGGGCATTTGGTGGTCTATA | Novel | NGC |
| GGGGCGCACCTCTCTTTACG | Novel | NGG |
| GGGTTGCGTCAGCAAACACT | Novel | NGG |
| GGTATACATTTAAACCCTAA | Novel | NAA |
| GGTTGCGTCAGCAAACACTT | Novel | NGC |
| GTAGCTCCAAATTCTTTATA | Novel | NGG |
| GTATACATTTAAACCCTAAC | Novel | NAA |
| GTCCAAGAGTCCTCTTATGT | Novel | NAG |
| GTCCAAGGAATACTAACATT | Novel | NAG |
| GTCCACCACGAGTCTAGACTC | E6/M2 | NNNRRT |
| GTCCATGCCCCAAAGCCACC | Novel | NAA |
| GTCCCGTCGGCGCTGAATCC | Novel | NGC |
| GTCCTTTGTTTACGTCCCGT | Novel | NGG |
| GTCGCAGAAGATCTCAATCT | Novel | NGG |
| GTCTGTGCCTTCTCATCTGC | Novel | NGG |
| GTGCCAAGTGTTTGCTGACG | Novel | NAA |
| GTGGACTTCTCTCAATTTTC | Novel | NAG |
| GTTAATCATTACTTCCAAAC | Novel | NAG |
| GTTACCAATTTTCTTTTGTCT | Novel | NNGRRT |
| GTTACCAATTTTCTTTTGTCT | Novel | NNNRRT |
| GTTATCGCTGGATGTGTCTG | Novel | NGG |
| GTTCCGCAGTATGGATCGGC | E17 | NGA |
| GTTCCGCAGTATGGATCGGC | Novel | NNAGGA |
| GTTTACTAGTGCCATTTGTT | Novel | NAG |
| GTTTACTAGTGCCATTTGTTC | Novel | NNNRRT |
| TAAAACGCCGCAGACACATC | Novel | NAG |
| TAAAACGCCGCAGACACATCC | E18 | NNNRRT |
| TACCGCAGAGTCTAGACTCG | M34 | NGG |
| TAGCAGCAGGATGAAGAGGAA | Novel | NNNRRT |
| TAGCCGCTTGTTTTGCTCGC | Novel | NGC |
| TAGCCGCTTGTTTTGCTCGCA | Novel | NNNRRT |
| TAGGCAGAGGTGAAAAAGTTG | Novel | NNNRRT |
| TAGGGCTTTCCCCCACTGTT | Novel | NGG |
| TAGTATTCCTTGGACTCATA | Novel | NGG |
| TATACATTTAAACCCTAACA | Novel | NAA |
| TATGTTGCCCGTTTGTCCTC | Novel | NAA |
| TATTCCTTGGACTCATAAGG | Novel | NGG |
| TCAGTTTACTAGTGCCATTTG | Novel | NNNRRT |
| TCCACCACGAGTCTAGACTC | Novel | NGC |
| TCCCCCTAGAAAATTGAGAG | Novel | NAG |
| TCCGCAGTATGGATCGGCAG | E19 | NGG |
| TCCTAGCCGCTTGTTTTGCT | Novel | NGC |
| TCCTCTGCCGATCCATACTG | E20 | NGG |
| TCCTCTTCATCCTGCTGCTA | Novel | NGC |
| TCGCAGAAGATCTCAATCTC | Novel | NGG |
| TCTCAATCGCCGCGTCGCAG | Novel | NAG |
| TCTTCTGCGACGCGGCGATT | Novel | NAG |
| TCTTGTTCCCAAGAATATGG | Novel | NGA |
| TGAAAGCCAAACAGTGGGGG | Novel | NAA |
| TGACGCAACCCCCACTGGCT | Novel | NGG |
| TGAGCCTGAGGGCTCCACCC | Novel | NAA |
| TGAGGCATAGCAGCAGGATG | Novel | NAG |
| TGCCCAAGGTCTTACATAAG | Novel | NGG |
| TGCCCGTTTGTCCTCTAATT | Novel | NNAGGA |
| TGCCCGTTTGTCCTCTAATTC | Novel | NNGRRT |
| TGCCCGTTTGTCCTCTAATTC | Novel | NNNRRT |
| TGCGAGCAAAACAAGCGGCT | Novel | NGG |
| TGCTGGTGGCTCCAGTTCAGG | Novel | NNNRRT |
| TGGACTTCTCTCAATTTTCT | E21 | NGG |
| TGGCCAAAATTCGCAGTCCC | Novel | NAA |
| TGGGGACTGCGAATTTTGGC | Novel | NAA |
| TGGTTATCGCTGGATGTGTC | Novel | NGC |
| TGTGCACTTCGCTTCACCTC | Novel | NGC |
| TGTGTCTTGGCCAAAATTCG | Novel | NAG |
| TTAAACCCTAACAAAACAAA | Novel | NAG |
| TTACTCTCGTTTTTGCCTTC | Novel | NGA |
| TTAGGCAGAGGTGAAAAAGT | Novel | NGC |
| TTATCGCTGGATGTGTCTGC | Novel | NGC |
| TTCCCCCACTGTTTGGCTTT | Novel | NAG |
| TTCCCGAGATTGAGATCTTC | Novel | NGC |
| TTCCGCAGTATGGATCGGCA | Novel | NAG |
| TTCGCTTCACCTCTGCACGT | Novel | NGC |
| TTGCTGACGCAACCCCCACT | Novel | NGC |
| TTGGAGGACAGGAGGTTGGTG | Novel | NNNRRT |
| TTTGCTGACGCAACCCCCAC | E23 | NGG |

Table 24 provides a list of sequences targeted by guide RNAs that introduce premature STOP codons into HBV genes.

TABLE 24
STOP gRNA List

| guide_seq | guide_id | pam |
|---|---|---|
| AACAAGATCTACAGCATGGGG | M21 | NNGRRT |
| AACCCCATCTCTTTGTTTTGT | M27 | NNGRRT |
| AAGCCACCCAAGGCACAGCT | M39 (precore) | NGG |
| AAGCCCAGGATGATGGGATG | M68 | NGA |
| ACACATCCAGCGATAACCAGG | M3 | NNNRRT |
| ACAGGCGGGGTTTTTCTTGT | M64 | NGA |
| ACCAGGACAAGTTGGAGGAC | M57 | NGG |
| ACCAGGACAAGTTGGAGGACA | M25 | NNNRRT |
| ACGAACCACTGAACAAATGGC | M5 | NNNRRT |
| ACGCCAACAAGGTAGGAGCT | M82 | NGA |
| AGCCACCAGCAGGGAAATAC | M56 | NGG |
| AGCCACCCAAGGCACAGCTT | M72 | NGA |
| AGGCAAGCAATTCTTTGCTG | M43 | NGG |
| AGGGTCCCCAATCCTCGAGA | M86 | NGA |
| AGTCCAAGGAATACTAACAT | M78 | NGA |
| ATTTACACCAAGACATTATCA | M16 | NNNRRT |
| CAACGAATTGTGGGTCTTTT | M62 | NGG |
| CAATACCGCAGAGTCTAGACT | M1 | NNNRRT |
| CACCACGAGTCTAGACTCTG | M36 | NGG |
| CAGGCAAGCAATTCTTTGCT | M42 | NGG |
| CATCCATATAACTGAAAGCCA | M6 | NNNRRT |
| CATGCAACTTTTTCACCTCTG | M8 | NNNRRT |
| CCAATCCTCGAGAAGATTGA | M84 | NGA |
| CCACCAATCGCCAGACAGGA | M55 | NGG |
| CCACCAGCACGGGACCATGC | M90 | NGA |
| CCACCCAAGGCACAGCTTGG | M38 | NGG |
| CCACTCCCATAGGAATTTTC | M69 | NGA |
| CCAGCAAAGAATTGCTTGCC | M73 | NGA |
| CCAGCCTTCAGAGCAAACACA | M22 | NNNRRT |
| CCAGGACAAGTTGGAGGACA | M88 | NGA |
| CCATGCCCCAAAGCCACCCA | M40 (precore) | NGG |
| CCCAACAAGGACACCTGGCC | M81 | NGA |
| CCCACCCAGGTAGCTAGAGTC | M11 | NNNRRT |
| CCCATCTCTTTGTTTTGTTA | M59 | NGG |
| CCCCAGCAAAGAATTGCTTGC | M10 | NNGRRT |
| CCCCATCTCTTTGTTTTGTT | M60 | NGG |
| CCGCCTTCCATAGAGTGTGTA | M19 | NNNRRT |
| CCGGCAACGGCCAGGTCTGTG | M32 | NNNRRT |
| CCTCCACCAATCGCCAGACA | M83 | NGA |
| CGATAACCAGGACAAGTTGG | M58 | NGG |
| CGCAGAGTCTAGACTCGTGG | M35 | NGG |
| CTCAATCGCCGCGTCGCAGA | M77 | NGA |
| CTCCATGCGACGTGCAGAGG | M92 | NGA |
| CTGAGCCAGGAGAAACGGGC | M70 | NGA |
| CTGCCAACTGGATCCTGCGC | M191 | NGG |
| CTTCTCTCAATTTTCTAGGG | M87 | NGA |
| GAAAGCCCAGGATGATGGGA | M37 | NGG |
| GAAAGCCCAGGATGATGGGAT | M4 | NNGRRT |
| GAAGATCTCAATCTCGGGAAC | M14 | NNNRRT |
| GAATCCACACTCCGAAAGACA | M12 | NNNRRT |
| GACACATCCAGCGATAACCA | M67 | NGA |
| GACGACGAGGCAGGTCCCCT | M74 | NGA |
| GACGAGGCAGGTCCCCTAGA | M75 | NGA |
| GACGCCAACAAGGTAGGAGC | M53 | NGG |
| GAGAAGTCCACCACGAGTCT | M66 | NGA |
| GATAACCAGGACAAGTTGGA | M89 | NGA |
| GATTGCAATTGATTATGCCTG | M18 | NNNRRT |
| GCAAGCAATTCTTTGCTGGG | M45 | NGG |
| GCAGAGTCTAGACTCGTGGT | M65 | NGA |
| GCCACAAGAACACATCATACA | M28 | NNNRRT |
| GCTGCCAACTGGATCCTGCG | M190 | NGG |
| GCTGTACCAAACCTTCGGAC | M91 | NGA |
| GGAACAAGATCTACAGCATG | M51 | NGG |
| GGCAAGCAATTCTTTGCTGG | M44 | NGG |
| GGGAACAAGATCTACAGCAT | M50 | NGG |
| GGTCTCAATCGCCGCGTCGC | M76 | NGA |
| GGTCTCAATCGCCGCGTCGCA | M13 | NNNRRT |
| GGTCTCCATGCGACGTGCAG | M63 | NGG |
| GGTGGTCTCCATGCGACGTGC | M33 | NNNRRT |
| GTCCACCACGAGTCTAGACTC | E16/M2 | NNNRRT |
| GTGGTCTCCATGCGACGTGC | M93 | NGA |
| GTTTTCCAATGAGGATTAAAG | M15 | NNNRRT |
| TACACAATGTGGTTATCCTGC | M31 | NNNRRT |
| TACCACATCATCCATATAAC | M71 | NGA |
| TACCGCAGAGTCTAGACTCG | M34 | NGG |
| TACTTTCCAATCAATAGGCCT | M29 | NNNRRT |
| TATACCCAAAGACAAAAGAAA | M7 | NNNRRT |
| TCAACGAATTGTGGGTCTTT | M61 | NGG |
| TCAATCCCAACAAGGACACC | M52 | NGG |
| TCAGGCAAGCAATTCTTTGC | M41 | NGG |
| TCCAAGGAATACTAACATTG | M46 | NGG |
| TCCCAAGAATATGGTGACCCA | M20 | NNNRRT |
| TCCCCAATCCTCGAGAAGAT | M85 | NGA |
| TCCCCAATCCTCGAGAAGATT | M24 | NNNRRT |
| TGAACAGTTTGTAGGCCCACT | M17 | NNNRRT |
| TGCAATTGATTATGCCTGCT | M48 | NGG |
| TGCCAACTGGATCCTGCGCG | M189 | NGA |
| TGCTCCAGCTCCTACCTTGT | M54 | NGG |
| TGCTGTACCAAACCTTCGGAC | M26 | NNNRRT |
| TGGGAACAAGATCTACAGCA | M49 | NGG |
| TGTCAACGAATTGTGGGTCTT | M30 | NNGRRT |
| TGTTTTCCAATGAGGATTAA | M79 | NGA |
| TTCAAGCCTCCAAGCTGTGCC | E22/M9 | NNGRRT |
| TTCAGAGCAAACACAGCAAAT | M23 | NNNRRT |
| TTCCAATGAGGATTAAAGAC | M47 | NGG |
| TTTCCACCAGCAATCCTCTG | M80 | NGA |
| AAAGCCAAACAGTGGGGGAA | Novel | NGC |
| AAAGCCCAGGATGATGGGAT | Novel | NGG |
| AACAAGATCTACAGCATGGGG | Novel | NNNRRT |
| AACCACTGAACAAATGGCAC | Novel | NAG |
| AACCAGGACAAGTTGGAGGA | Novel | NAG |
| AACCCCATCTCTTTGTTTTGT | Novel | NNNRRT |
| AACTCTGCAAGATCCCAGAG | Novel | NGA |
| AAGCCCCAGCCAGTGGGGGT | Novel | NGC |
| AATGTATACCCAAAGACAAAA | Novel | NNNRRT |
| AATTCGCAGTCCCCAACCTC | Novel | NAA |
| ACATCATCCATATAACTGAA | Novel | NGC |
| ACATCCAGCGATAACCAGGA | Novel | NAA |
| ACCCAAAGACAAAAGAAAAT | Novel | NGG |
| ACCCAGGTAGCTAGAGTCAT | Novel | NAG |
| ACCCCATCTCTTTGTTTTGT | Novel | NAG |
| ACCTCAATGTTAGTATTCCT | Novel | NGG |
| ACGACGAGGCAGGTCCCCTA | Novel | NAA |
| ACTCCCATAGGAATTTTCCG | Novel | NAA |
| ACTCCTCCCAGTCTTTAAAC | Novel | NAA |
| ACTCCTCCCAGTCTTTAAACA | E96 | NNNRRT |
| ACTCTGCAAGATCCCAGAGT | Novel | NAG |
| AGACGACGAGGCAGGTCCCC | Novel | NAG |
| AGATTGCAATTGATTATGCC | Novel | NGC |
| AGCCAGGAGAAACGGGCTGA | Novel | NGC |
| AGCCCAGGATGATGGGATGG | Novel | NAA |
| AGCCTTCAGAGCAAACACAG | Novel | NAA |
| AGCGATAACCAGGACAAGTT | Novel | NNAGGA |
| AGGTCTCAATCGCCGCGTCG | Novel | NAG |
| ATACTACAAACTTTGCCAGC | Novel | NAA |
| ATCCACACTCCGAAAGACAC | Novel | NAA |
| ATCCAGTTGGCAGCACAGCC | Novel | NAG |
| ATGGGGCAGAATCTTTCCAC | Novel | NAG |
| ATGGGGCAGAATCTTTCCACC | Novel | NNNRRT |
| ATTTGTTCAGTGGTTCGTAG | Novel | NGC |
| ATTTTGGCCAAGACACACGG | Novel | NAG |
| CAAAATTCGCAGTCCCCAACC | Novel | NNNRRT |
| CAACCACCAGCACGGGACCA | Novel | NGC |
| CAATCCCAACAAGGACACCT | Novel | NGC |
| CAATCGCCAGACAGGAAGGC | Novel | NGC |
| CACCAAACTCTGCAAGATCC | Novel | NAG |
| CACCAATCGCCAGACAGGAA | Novel | NGC |
| CACCAGCACGGGACCATGCC | Novel | NAA |
| CACCAGTTGGATCCAGCCTT | Novel | NAG |
| CACTCCCATAGGAATTTTCC | Novel | NAA |
| CAGACGAAGGTCTCAATCGC | Novel | NGC |
| CAGGATCCAGTTGGCAGCAC | Novel | NGC |
| CATACTACAAACTTTGCCAG | Novel | NAA |
| CATCCAGCGATAACCAGGAC | Novel | NAG |
| CATCCATATAACTGAAAGCC | Novel | NAA |
| CCAATACCACATCATCCATA | Novel | NAA |
| CCACAAGAACACATCATACA | Novel | NAA |
| CCCCAGCAAAGAATTGCTTGC | Novel | NNNRRT |
| CCCCCCAGCAAAGAATTGCT | Novel | NGC |
| CCCGGCAACGGCCAGGTCTG | Novel | NGC |
| CCGCCTTCCATAGAGTGTGT | Novel | NAA |
| CCTCAATGTTAGTATTCCTT | Novel | NGA |
| CCTCCCAGTCTTTAAACAAA | Novel | NAG |
| CCTTCCATAGAGTGTGTAAA | Novel | NAG |
| CGACGAGGCAGGTCCCCTAG | Novel | NAG |
| CGCCAACAAGGTAGGAGCTG | Novel | NAG |
| CGCCCACCGAATGTTGCCCA | E95 | NGG |
| CGGACGACCCTTCTCGGGGT | Novel | NGC |
| CGTCTGGCCAGGTGTCCTTGT | Novel | NNGRRT |
| CGTCTGGCCAGGTGTCCTTGT | Novel | NNNRRT |
| CGTTCCGACCGACCACGGGG | Novel | NGC |
| CTACGAACCACTGAACAAAT | Novel | NGC |
| CTCAATCTCGGGAACCTCAAT | Novel | NNNRRT |
| CTCCACCAATCGCCAGACAG | Novel | NAA |
| CTCCACCCCAAAAGGCCTCCG | Novel | NNNRRT |
| CTCCCATAGGAATTTTCCGA | Novel | NAG |
| CTCTGCAAGATCCCAGAGTG | Novel | NGA |
| CTGAAAGCCAAACAGTGGGG | Novel | NAA |
| CTGCAAGATCCCAGAGTGAG | Novel | NGG |
| CTGGCCAGGTGTCCTTGTTG | Novel | NGA |
| CTGTACCAAACCTTCGGACG | Novel | NAA |
| CTGTGCCAAGTGTTTGCTGA | Novel | NGC |
| GAAAGCCAAACAGTGGGGGA | Novel | NAG |
| GAAAGCCCAGGATGATGGGAT | Novel | NNNRRT |
| GAACAAGATCTACAGCATGG | Novel | NGC |
| GAGCCACCAGCAGGGAAATA | Novel | NAG |
| GAGCCAGGAGAAACGGGCTG | Novel | NGG |
| GAGTCCAAGGAATACTAACAT | Novel | NNNRRT |
| GATCTCAATCTCGGGAACCT | Novel | NAA |
| GCAGGATCCAGTTGGCAGCA | Novel | NAG |
| GCCAACAAGGTAGGAGCTGG | Novel | NGC |
| GCCACAAGAACACATCATAC | Novel | NAA |
| GCCACCAGCAGGGAAATACA | Novel | NGC |
| GCCAGGTGTCCTTGTTGGGAT | Novel | NNNRRT |
| GCCGTTCCGACCGACCACGG | Novel | NGC |
| GCCTTCAGAGCAAACACAGC | Novel | NAA |
| GCGAATCCACACTCCGAAAG | Novel | NNACCA |
| GCGATAACCAGGACAAGTTG | Novel | NAG |
| GCTCCAGCTCCTACCTTGTT | Novel | NGC |
| GGCATACTACAAACTTTGCCA | Novel | NNNRRT |
| GGCTCCAGTTCAGGAGCAGT | Novel | NAA |
| GGGCAGAATCTTTCCACCAG | Novel | NAA |
| GGGCCATCAGCGCGTGCGTG | Novel | NAA |
| GTACGAGATCTTCTAGATAC | Novel | NGC |
| GTATACCCAAAGACAAAAGA | Novel | NAA |
| GTCCAAGGAATACTAACATT | Novel | NAG |
| GTCTCAATCGCCGCGTCGCA | Novel | NAA |
| GTCTGGCCAGGTGTCCTTGT | Novel | NGG |
| GTGAAACCACAAGAGTTGCC | Novel | NGA |
| GTGCCAAGTGTTTGCTGACG | Novel | NAA |
| GTGCTGCCAACTGGATCCTG | Novel | NGC |
| GTGTTTTCCAATGAGGATTA | Novel | NAG |
| TAACCAGGACAAGTTGGAGG | Novel | NNAGGA |
| TAAGCAGGCTTTCACTTTCT | Novel | NGC |
| TACACCAAGACATTATCAAA | Novel | NAA |
| TCACCAAACTCTGCAAGATCC | Novel | NNGRRT |
| TCACCAAACTCTGCAAGATCC | Novel | NNNRRT |
| TCAGGCTCAGGGCATACTAC | Novel | NAA |
| TCATCCATATAACTGAAAGC | Novel | NAA |
| TCCAATCAATAGGCCTGTTA | Novel | NNAGGA |
| TCCACCAATCGCCAGACAGG | Novel | NAG |
| TCCACCACGAGTCTAGACTC | Novel | NGC |
| TCCCAACAAGGACACCTGGC | Novel | NAG |
| TCCCATAGGAATTTTCCGAA | Novel | NGC |
| TCCCGACCACCAGTTGGATC | Novel | NAG |
| TCGCAGACGAAGGTCTCAAT | Novel | NGC |
| TCTCAATCGCCGCGTCGCAG | Novel | NAG |
| TCTGCAAGATCCCAGAGTGA | Novel | NAG |
| TCTGGCCAGGTGTCCTTGTT | Novel | NGG |
| TGAAACCACAAGAGTTGCCT | Novel | NAA |
| TGAAAGCCAAACAGTGGGGG | Novel | NAA |
| TGAGCCAGGAGAAACGGGCT | Novel | NAG |
| TGCCACAAGAACACATCATA | Novel | NAA |
| TGCCGAACCTGCATGACTAC | Novel | NGC |
| TGGCCAAAATTCGCAGTCCC | Novel | NAA |
| TGGCTCCAGTTCAGGAGCAG | Novel | NAA |
| TGGGGCAGAATCTTTCCACC | Novel | NGC |
| TGGTCTCCATGCGACGTGCA | Novel | NAG |
| TGTACCAAACCTTCGGACGG | Novel | NAA |
| TGTATACCCAAAGACAAAAG | Novel | NAA |
| TGTCAACGAATTGTGGGTCTT | Novel | NNNRRT |
| TTACACCAAGACATTATCAA | Novel | NAA |
| TTCTCTCAATTTTCTAGGGG | Novel | NAA |
| TTGCAATTGATTATGCCTGC | Novel | NAG |
| TTTACACAATGTGGTTATCC | Novel | NGC |
| TTTACACCAAGACATTATCA | Novel | NAA |
| TTTCCAATCAATAGGCCTGT | Novel | NAA |
| TTTCCAATGAGGATTAAAGA | Novel | NAG |

Table 25 is a list of sequences targeted by guide RNAs in the HBV genome.

TABLE 25
gRNAs for targeting the HBV genome

| guide_seq | guide_id | pam |
|---|---|---|
| AAAAAATCAAAGAATGTTTT | Novel | NGA |
| AAAAAATGTGAACAGTTTGT | Novel | NGG |
| AAAAACCCCGCCTGTAACAC | Novel | NAG |
| AAAAAGTTGCATGGTGCTGG | Novel | NGC |
| AAAAATCAAAGAATGTTTTA | Novel | NAA |
| AAAAATGTGAACAGTTTGTA | Novel | NGC |
| AAAACAAGCGGCTAGGAGTTC | Novel | NNNRRT |
| AAAACATTCTTTGATTTTTTG | Novel | NNNRRT |
| AAAACCCCGCCTGTAACACG | Novel | NGA |
| AAAACGCCGCAGACACATCC | Novel | NGC |
| AAAAGATGGTGTTTTCCAAT | Novel | NAG |
| AAAAGGTTCCACGCACGCGC | Novel | NGA |
| AAAAGTGAGACAAGAAATGT | Novel | NAA |
| AAAATCAAAGAATGTTTTAG | Novel | NAA |
| AAAATTGGTAACAGCGGTAA | Novel | NAA |
| AAACAAAGGACGTCCCGCGC | Novel | NGG |
| AAACAAGCGGCTAGGAGTTC | Novel | NGC |
| AAACACAGCAAATCCAGATT | Novel | NGG |
| AAACACTCATCCTCAGGCCA | Novel | NGC |
| AAACCCAGCCCGAATGCTCC | Novel | NGC |
| AAACCCCGCCTGTAACACGA | Novel | NAA |
| AAACGAGAGTAACTCCACAG | Novel | NAG |
| AAACGGGCAACATACCTTGA | Novel | NAG |
| AAACTACTGTTGTTAGACGA | Novel | NGA |
| AAACTGAGCCAGGAGAAACG | Novel | NGC |
| AAACTGTTCACATTTTTTGA | Novel | NAA |
| AAACTTCCTATTAACAGGCCT | Novel | NNNRRT |
| AAAGAATCCCAGAGGATTGC | Novel | NGG |
| AAAGAATTTGGAGCTACTGT | Novel | NGA |
| AAAGACTGGGAGGAGTTGGG | Novel | NGA |
| AAAGACTGGGAGGAGTTGGG | Novel | NNAGGA |
| AAAGAGATGGGGTTACTCTC | Novel | NGA |
| AAAGATGGTGTTTTCCAATG | Novel | NGG |
| AAAGATTCTGCCCCATGCTG | Novel | NAG |
| AAAGCCAAACAGTGGGGGAA | Novel | NGC |
| AAAGCCCAGGATGATGGGAT | Novel | NGG |
| AAAGGCCTTGTAAGTTGGCG | Novel | NGA |
| AAAGGCCTTGTAAGTTGGCGA | Novel | NNNRRT |
| AAAGGTGGAGACAGCGGGGT | Novel | NGG |
| AAAGTATGTCAACGAATTGT | Novel | NGG |
| AAAGTGAGACAAGAAATGTG | Novel | NAA |
| AAAGTGAGACAAGAAATGTG | Novel | NNACCA |
| AAAGTTGCATGGTGCTGGTG | Novel | NGC |
| AAAGTTTGTAGTATGCCCTG | Novel | NGC |
| AAATACAGGCCTCTCACTCT | Novel | NGG |
| AAATATTTACCATTGGATAA | Novel | NGG |
| AAATCAAAGAATGTTTTAGA | Novel | NAA |
| AAATGGGGCAGCAAAACCCA | Novel | NAA |
| AAATGTATACCCAAAGACAA | Novel | NAG |
| AAATGTATATTAGGAAAAGA | Novel | NGG |
| AAATGTGAAACCACAAGAGT | Novel | NGC |
| AAATTAACACCCACCCAGGT | Novel | NGC |
| AAATTGAGAGAAGTCCACCA | Novel | NGA |
| AAATTGGTAACAGCGGTAAA | Novel | NAG |
| AACAAACAGTCTTTGAAGTA | Novel | NGC |
| AACAAAGGACGTCCCGCGCA | Novel | NGA |
| AACAAATGGCACTAGTAAAC | Novel | NGA |
| AACAAGAAAAACCCCGCCTG | Novel | NAA |
| AACAAGAAGATGAGGCATAG | Novel | NAG |
| AACAAGAGATGATTAGGCAG | Novel | NGG |
| AACAAGATCTACAGCATGGGG | M21 | NNGRRT |
| AACAAGATCTACAGCATGGGG | Novel | NNNRRT |
| AACAAGGACACCTGGCCAGA | Novel | NGC |
| AACAATGCTCAGGAGACTCT | Novel | NAG |
| AACACAGCAAATCCAGATTG | Novel | NGA |
| AACACATCATACAAAAAATC | Novel | NAA |
| AACACATCATACAAAAAATCA | Novel | NNGRRT |
| AACACATCATACAAAAAATCA | Novel | NNNRRT |
| AACACCCACCCAGGTAGCTA | Novel | NAG |
| AACACGAGAAGGGGTCCTAG | Novel | NAA |
| AACAGAGTTATCAGTCCCGA | Novel | NAA |
| AACAGCGGTAAAAAGGGACT | Novel | NAA |
| AACAGTAGGACATGAACAAG | Novel | NGA |
| AACAGTAGGACATGAACAAGA | Novel | NNNRRT |
| AACAGTCTTTGAAGTATGCCT | Novel | NNNRRT |
| AACAGTGGGGGAAAGCCCTA | Novel | NGA |
| AACATACCTTGATAGTCCAG | Novel | NAG |
| AACATCACATCAGGATTCCT | Novel | NGG |
| AACATGGAGAACATCACATC | Novel | NGG |
| AACATTGAGGTTCCCGAGAT | Novel | NGA |
| AACCACTGAACAAATGGCAC | Novel | NAG |
| AACCAGGACAAGTTGGAGGA | Novel | NAG |
| AACCCATAAAATTCAGAGAG | Novel | NAA |
| AACCCCATCTCTTTGTTTTGT | M27 | NNGRRT |
| AACCCCATCTCTTTGTTTTGT | Novel | NNNRRT |
| AACCCCCACTGGCTGGGGCT | Novel | NGG |
| AACCCCGCCTGTAACACGAG | Novel | NAG |
| AACCCCGCCTGTAACACGAGA | Novel | NNGRRT |
| AACCCCGCCTGTAACACGAGA | Novel | NNNRRT |
| AACCCTAACAAAACAAAGAGA | Novel | NNGRRT |
| AACCCTAACAAAACAAAGAGA | Novel | NNNRRT |
| AACCTAGCAGGCATAATCAAT | Novel | NNNRRT |
| AACCTGCATGACTACTGCTC | Novel | NAG |
| AACCTTTCACCAAACTCTGC | Novel | NAG |
| AACCTTTGGATAAAACCTAG | Novel | NAG |
| AACCTTTTCGGCTCCTCTGC | Novel | NGA |
| AACGAGAGTAACTCCACAGT | Novel | NGC |
| AACGCAGGATAACCACATTGT | Novel | NNNRRT |
| AACGCCCACCGAATGTTGCC | Novel | NAA |
| AACGCCGCAGACACATCCAG | Novel | NGA |
| AACGGTTTCTCTTCCAAAAG | Novel | NGA |
| AACTAATGACTCTAGCTACC | Novel | NGG |
| AACTACCGTGTGTCTTGGCC | Novel | NAA |
| AACTACTGTTGTTAGACGAC | Novel | NAG |
| AACTAGATGTTCTGGATAAT | Novel | NAG |
| AACTCCCTCGCCTCGCAGAC | Novel | NAA |
| AACTCCTCCCAGTCTTTAAA | Novel | NAA |
| AACTCTGCAAGATCCCAGAG | Novel | NGA |
| AACTCTGTTGTCCTCTCCCG | Novel | NAA |
| AACTGAAAGCCAAACAGTGG | Novel | NGG |
| AACTGGAGCCACCAGCAGGG | Novel | NAA |
| AACTTCCAATGACATAACCCA | Novel | NNNRRT |
| AACTTGTCCTGGTTATCGCT | Novel | NGA |
| AAGAAAATTGGTAACAGCGG | Novel | NAA |
| AAGAACCAACAAGAAGATGA | Novel | NGC |
| AAGAAGATGAGGCATAGCAG | Novel | NAG |
| AAGAAGATTGCAATTGATTA | Novel | NGC |
| AAGAAGTCAGAAGGCAAAAA | Novel | NGA |
| AAGAAGTCAGAAGGCAAAAAC | Novel | NNGRRT |
| AAGAAGTCAGAAGGCAAAAAC | Novel | NNNRRT |
| AAGAATCCTCACAATACCGC | Novel | NGA |
| AAGAATTGCTTGCCTGAGTG | Novel | NAG |
| AAGAATTTGGAGCTACTGTG | Novel | NAG |
| AAGACATTATCAAAAAATGT | Novel | NAA |
| AAGACATTATCAAAAAATGTG | Novel | NNNRRT |
| AAGACTGGGAGGAGTTGGGG | Novel | NAG |
| AAGACTGTTTGTTTAAAGAC | Novel | NGG |
| AAGAGAAACCGTTATAGAGTA | Novel | NNNRRT |
| AAGAGAGAAACAACACATAG | Novel | NGC |
| AAGAGATGATTAGGCAGAGG | Novel | NGA |
| AAGAGATGGGGTTACTCTCT | Novel | NAA |
| AAGAGGACTCTTGGACTCTC | Novel | NGC |
| AAGATCTACAGCATGGGGCA | Novel | NAA |
| AAGATCTCGTACTGAAGGAA | Novel | NGA |
| AAGATGGTGTTTTCCAATGA | Novel | NGA |
| AAGATTCTGCCCCATGCTGT | Novel | NGA |
| AAGATTGACGATAAGGGAGA | Novel | NGC |
| AAGCAATTCTTTGCTGGGGG | Novel | NAA |
| AAGCCACCCAAGGCACAGCT | M39 | NGG |
| AAGCCCAGGATGATGGGATG | M68 | NGA |
| AAGCCCCAGCCAGTGGGGGT | Novel | NGC |
| AAGCCCTACGAACCACTGAA | Novel | NAA |
| AAGCCTCCAAGCTGTGCCTT | Novel | NGG |
| AAGCGAAGTGCACACGGTCC | Novel | NGC |
| AAGCGAAGTGCACACGGTCCG | Novel | NNNRRT |
| AAGGAAAGAAGTCAGAAGGC | Novel | NAA |
| AAGGACACCTGGCCAGACGC | Novel | NAA |
| AAGGCACAGCTTGGAGGCTT | Novel | NAA |
| AAGGCACAGCTTGGAGGCTTG | E1 | NNNRRT |
| AAGGCCTCCGTGCGGTGGGG | Novel | NGA |
| AAGGCCTTGTAAGTTGGCGA | Novel | NAA |
| AAGGCGGGTATATTATATAA | Novel | NAG |
| AAGGCTTCCCGATACAGAGC | Novel | NGA |
| AAGGGACTCAAGATGCTGTA | Novel | NAG |
| AAGGGGACGAGAGAGTCCCA | Novel | NGC |
| AAGGGGTCCTAGGAATCCTGA | Novel | NNNRRT |
| AAGGGTCGATGTCCATGCCC | Novel | NAA |
| AAGGGTCGTCCGCAGGATTC | Novel | NGC |
| AAGGTAGGAGCTGGAGCATT | Novel | NGG |
| AAGGTCGGTCGTTGACATTG | Novel | NAG |
| AAGGTGGAGACAGCGGGGTA | Novel | NGC |
| AAGGTTACCAAATATTTACCA | Novel | NNGRRT |
| AAGGTTACCAAATATTTACCA | Novel | NNNRRT |
| AAGGTTTGGTACAGCAACAG | Novel | NAG |
| AAGGTTTGGTACAGCAACAGG | Novel | NNGRRT |
| AAGGTTTGGTACAGCAACAGG | Novel | NNNRRT |
| AAGTCAGAAGGCAAAAACGA | Novel | NAG |
| AAGTGAAAGCCTGCTTAGAT | Novel | NGA |
| AAGTTATGGGTCCTTGCCAC | Novel | NAG |
| AAGTTGGAGGACAGGAGGTTG | Novel | NNGRRT |
| AAGTTGGAGGACAGGAGGTTG | Novel | NNNRRT |
| AAGTTTTCTAAAACATTCTT | Novel | NGA |
| AATACAGGCCTCTCACTCTG | Novel | NGA |
| AATACTAACATTGAGGTTCC | Novel | NGA |
| AATAGTGTCTAGTTTGGAAG | Novel | NAA |
| AATAGTGTCTAGTTTGGAAGT | Novel | NNNRRT |
| AATATGGTGACCCACAAAAT | Novel | NAG |
| AATATTTGGTAACCTTTGGA | Novel | NAA |
| AATCAATAGGCCTGTTAATA | Novel | NGA |
| AATCCCAGAGGATTGCTGGT | Novel | NGA |
| AATCCGCCTCCTGCCTCCAC | Novel | NAA |
| AATCCTCTGGGATTCTTTCC | Novel | NGA |
| AATCCTCTGGGATTCTTTCC | Novel | NNACCA |
| AATCCTGCGGACGACCCTTCT | Novel | NNGRRT |
| AATCCTGCGGACGACCCTTCT | Novel | NNNRRT |
| AATCGCCGCGTCGCAGAAGAT | Novel | NNNRRT |
| AATCTCGGGAACCTCAATGT | Novel | NAG |
| AATCTTCTTTTCTCATTAACT | Novel | NNNRRT |
| AATGACTCTAGCTACCTGGG | Novel | NGG |
| AATGATTAACTAGATGTTCT | Novel | NGA |
| AATGATTAACTAGATGTTCTG | Novel | NNNRRT |
| AATGGCACTAGTAAACTGAG | Novel | NNAGGA |
| AATGGGGCAGCAAAACCCAA | Novel | NAG |
| AATGTATACCCAAAGACAAA | Novel | NGA |
| AATGTATACCCAAAGACAAAA | Novel | NNNRRT |
| AATGTCAACGACCGACCTTG | Novel | NGG |
| AATGTTTGCTCCAGACCTGC | Novel | NGC |
| AATTCGCAGTCCCCAACCTC | Novel | NAA |
| AATTCGTTGACATACTTTCCA | Novel | NNNRRT |
| AATTCTTTGCTGGGGGGAAC | Novel | NAA |
| AATTGAGAGAAGTCCACCAC | Novel | NAG |
| AATTGGTAACAGCGGTAAAA | Novel | NGG |
| AATTTATGCCTACAGCCTCC | Novel | NAG |
| AATTTGGAAGATCCAGCATC | Novel | NAG |
| AATTTTATGGGTTATGTCAT | Novel | NGG |
| AATTTTATGGGTTATGTCATT | Novel | NNNRRT |
| AATTTTCCGAAAGCCCAGGA | Novel | NGA |
| ACAAACTTTGCCAGCAAATC | Novel | NGC |
| ACAAAGAGATGGGGTTACTCT | Novel | NNGRRT |
| ACAAAGAGATGGGGTTACTCT | Novel | NNNRRT |
| ACAAATGGCACTAGTAAACT | Novel | NAG |
| ACAACAGTAGTTTCCGGAAGT | Novel | NNNRRT |
| ACAACCTTTCACCAAACTCTG | Novel | NNNRRT |
| ACAAGAAATGTGAAACCACA | Novel | NGA |
| ACAAGAACACATCATACAAA | Novel | NAA |
| ACAAGAAGATGAGGCATAGC | Novel | NGC |
| ACAAGAATCCTCACAATACCG | Novel | NNGRRT |
| ACAAGAATCCTCACAATACCG | Novel | NNNRRT |
| ACAAGAGTTGCCTGAACTTT | Novel | NGG |
| ACAAGATCTACAGCATGGGG | Novel | NAG |
| ACAAGCGGCTAGGAGTTCCG | Novel | NAG |
| ACAAGGCCTTTCTGTGTAAA | Novel | NAA |
| ACAAGGGCATTAACGCAGGA | Novel | NAA |
| ACAAGGGCATTAACGCAGGA | Novel | NNACCA |
| ACAATGCTCAGGAGACTCTA | Novel | NGG |
| ACAATGTGGTTATCCTGCGT | Novel | NAA |
| ACACACGGTAGTTCCCCCTA | Novel | NAA |
| ACACATAGCGCCTCATTTTG | Novel | NGG |
| ACACATCATACAAAAAATCA | Novel | NAG |
| ACACATCCAGCGATAACCAGG | M3 | NNNRRT |
| ACACCTGGCCAGACGCCAAC | Novel | NAG |
| ACACGGTAGTTCCCCCTAGA | Novel | NAA |
| ACACGGTCCGGCAGATGAGA | Novel | NGG |
| ACACTATTTACACACTCTAT | Novel | NGA |
| ACACTCATCCTCAGGCCATG | Novel | NAG |
| ACAGAAAGGCCTTGTAAGTT | Novel | NGC |
| ACAGACGGGGAGTCCGCGTA | Novel | NAG |
| ACAGAGCTGAGGCGGTATCT | Novel | NGA |
| ACAGAGCTGAGGCGGTATCTA | Novel | NNNRRT |
| ACAGCAAATCCAGATTGGGAC | Novel | NNNRRT |
| ACAGCAACAGGAGGGATACA | Novel | NAG |
| ACAGCAACAGGAGGGATACAT | Novel | NNNRRT |
| ACAGCGGTAAAAAGGGACTC | Novel | NAG |
| ACAGCTTGGAGGCTTGAACA | Novel | NNAGGA |
| ACAGGAGGTTGGTGAGTGAT | Novel | NGG |
| ACAGGAGGTTGGTGAGTGATT | Novel | NNNRRT |
| ACAGGCGGGGTTTTTCTTGT | M64 | NGA |
| ACAGGTACAGTAGAAGAATA | Novel | NAG |
| ACAGGTGCAATTTCCGTCCG | Novel | NAG |
| ACAGTAGTTTCCGGAAGTGT | Novel | NGA |
| ACAGTCTTTGAAGTATGCCT | Novel | NAA |
| ACAGTGGGGGAAAGCCCTAC | Novel | NAA |
| ACAGTGGGGGAAAGCCCTAC | Novel | NNACCA |
| ACAGTTTGTAGGCCCACTTA | Novel | NAG |
| ACATAACCCATAAAATTCAG | Novel | NGA |
| ACATAACTGACTACTAGGTCT | Novel | NNNRRT |
| ACATACCTTGATAGTCCAGA | Novel | NGA |
| ACATCACATCAGGATTCCTA | Novel | NGA |
| ACATCATACAAAAAATCAAA | Novel | NAA |
| ACATCATCCATATAACTGAA | Novel | NGC |
| ACATCCAGCGATAACCAGGA | Novel | NAA |
| ACATCGTATCCATGGCTGCT | Novel | NGG |
| ACATGAACAAGAGATGATTA | Novel | NGC |
| ACATGGAGAACATCACATCA | Novel | NGA |
| ACATTATCAAAAAATGTGAA | Novel | NAG |
| ACATTCTTTGATTTTTTGTA | Novel | NGA |
| ACATTGAGGTTCCCGAGATT | Novel | NAG |
| ACATTGTGTAAATGGGGCAG | Novel | NAA |
| ACATTTAAACCCTAACAAAA | Novel | NAA |
| ACATTTCTTGTCTCACTTTT | Novel | NGA |
| ACCAAACTCTGCAAGATCCC | Novel | NGA |
| ACCAAATATTTACCATTGGA | Novel | NAA |
| ACCAAATATTTACCATTGGAT | Novel | NNGRRT |
| ACCAAATATTTACCATTGGAT | Novel | NNNRRT |
| ACCAAATGCCCCTATCCTAT | Novel | NAA |
| ACCAACAAGAAGATGAGGCA | Novel | NAG |
| ACCAATTTATGCCTACAGCCT | E2 | NNNRRT |
| ACCAATTTTCTTTTGTCTTT | Novel | NGG |
| ACCACATCATCCATATAACT | Novel | NAA |
| ACCACATTGTGTAAATGGGG | Novel | NAG |
| ACCAGGACAAGTTGGAGGAC | M57 | NGG |
| ACCAGGACAAGTTGGAGGACA | M25 | NNNRRT |
| ACCAGTAAAGTTCCCCACCTT | Novel | NNGRRT |
| ACCAGTAAAGTTCCCCACCTT | Novel | NNNRRT |
| ACCAGTTGGATCCAGCCTTC | Novel | NGA |
| ACCCAAAGACAAAAGAAAAT | Novel | NGG |
| ACCCAGGTAGCTAGAGTCAT | Novel | NAG |
| ACCCATAACTTCCAATGACA | Novel | NAA |
| ACCCCATCTCTTTGTTTTGT | Novel | NAG |
| ACCCCGAGAAGGGTCGTCCG | Novel | NAG |
| ACCCCGCCTGTAACACGAGA | Novel | NGG |
| ACCCCGCTGTCTCCACCTTT | Novel | NAG |
| ACCCCTTCTCGTGTTACAGG | Novel | NGG |
| ACCCTAACAAAACAAAGAGA | Novel | NGG |
| ACCCTTATCCAATGGTAAATA | Novel | NNNRRT |
| ACCCTTCTCGGGGTCGCTTG | Novel | NGA |
| ACCGACCTTGAGGCATACTT | Novel | NAA |
| ACCGCCTCAGCTCTGTATCG | Novel | NGA |
| ACCTAGCAGGCATAATCAAT | Novel | NGC |
| ACCTCAATGTTAGTATTCCT | Novel | NGG |
| ACCTCACCATACTGCACTCA | Novel | NGC |
| ACCTCCTGTCCTCCAACTTGT | Novel | NNNRRT |
| ACCTGCATGACTACTGCTCA | Novel | NGG |
| ACCTGGCCGTTGCCGGGCAA | Novel | NGG |
| ACCTGGGTGGGTGTTAATTT | Novel | NGA |
| ACCTGGGTGGGTGTTAATTTG | Novel | NNNRRT |
| ACCTGTCTTTAATCCTCATT | Novel | NGA |
| ACCTTATTATCCAGAACATC | Novel | NAG |
| ACCTTCGTCTGCGAGGCGAG | Novel | NGA |
| ACCTTGGGCAACATTCGGTG | Novel | NGC |
| ACCTTTACCCCGTTGCCCGG | Novel | NAA |
| ACCTTTCACCAAACTCTGCA | Novel | NGA |
| ACCTTTGGATAAAACCTAGC | Novel | NGG |
| ACGAACCACTGAACAAATGGC | M5 | NNNRRT |
| ACGACGAGGCAGGTCCCCTA | Novel | NAA |
| ACGAGAAGGGGTCCTAGGAAT | Novel | NNNRRT |
| ACGAGGCAGGTCCCCTAGAA | Novel | NAA |
| ACGATGTATATTTGCGGGAG | Novel | NGG |
| ACGCAACCCCCACTGGCTGG | Novel | NGC |
| ACGCACGCGCTGATGGCCCA | Novel | NGA |
| ACGCACGCGCTGATGGCCCA | Novel | NNACCA |
| ACGCCAACAAGGTAGGAGCT | M82 | NGA |
| ACGCCCACCGAATGTTGCCC | Novel | NAG |
| ACGCGCTGATGGCCCATGAC | Novel | NAA |
| ACGGAGGCCTTTTGGGGTGG | Novel | NGC |
| ACGGCAGACGGAGAAGGGGA | Novel | NGA |
| ACGGGCTGAGGCCCACTCCC | Novel | NNAGGA |
| ACGGGGAGTCCGCGTAAAGA | Novel | NAG |
| ACGGGGCGCACCTCTCTTTA | Novel | NGC |
| ACGGTGGTCTCCATGCGACG | Novel | NGC |
| ACGGTTTCTCTTCCAAAAGT | Novel | NAG |
| ACGTCGCATGGAGACCACCG | Novel | NGA |
| ACTAATATGGGCCTAAAGTT | Novel | NAG |
| ACTAATGACTCTAGCTACCT | Novel | NGG |
| ACTACCGTGTGTCTTGGCCA | Novel | NAA |
| ACTACTAGGTCTCTAGATGC | Novel | NGG |
| ACTACTGTTGTTAGACGACG | Novel | NGG |
| ACTAGATGTTCTGGATAATA | Novel | NGG |
| ACTAGGAGGCTGTAGGCATAA | Novel | NNNRRT |
| ACTAGTAAACTGAGCCAGGA | Novel | NAA |
| ACTATTTACACACTCTATGG | Novel | NAG |
| ACTCATAAGGTGGGGAACTTT | Novel | NNNRRT |
| ACTCCCATAGGAATTTTCCG | Novel | NAA |
| ACTCCCTCGCCTCGCAGACG | Novel | NAG |
| ACTCCTCCAGCTTATAGACCA | Novel | NNNRRT |
| ACTCCTCCCAGTCTTTAAAC | Novel | NAA |
| ACTCCTCCCAGTCTTTAAACA | E96 | NNNRRT |
| ACTCTAAGGCTTCCCGATAC | Novel | NGA |
| ACTCTAGCTACCTGGGTGGGT | Novel | NNNRRT |
| ACTCTGCAAGATCCCAGAGT | Novel | NAG |
| ACTCTGTTGTCCTCTCCCGC | Novel | NAA |
| ACTGAAAGCCAAACAGTGGG | Novel | NGA |
| ACTGAACAAATGGCACTAGT | Novel | NAA |
| ACTGAAGGAAAGAAGTCAGA | Novel | NGG |
| ACTGGCTGGGGCTTGGTCAT | Novel | NGG |
| ACTGGGAGGAGTTGGGGGAG | Novel | NAG |
| ACTGTTGTTAGACGACGAGG | Novel | NAG |
| ACTGTTTGTTTAAAGACTGG | Novel | NAG |
| ACTGTTTGTTTAAAGACTGGG | Novel | NNGRRT |
| ACTGTTTGTTTAAAGACTGGG | Novel | NNNRRT |
| ACTTACAAGGCCTTTCTGTG | Novel | NAA |
| ACTTACAGTTAATGAGAAAA | Novel | NAA |
| ACTTCAAAGACTGTTTGTTT | Novel | NAA |
| ACTTCCAATGACATAACCCA | Novel | NAA |
| ACTTCTCTCAATTTTCTAGG | Novel | NGG |
| ACTTTCTCGCCAACTTACAA | Novel | NGC |
| AGAAAATTGGTAACAGCGGT | Novel | NAA |
| AGAAACCGTTATAGAGTATT | Novel | NGG |
| AGAAAGGCCTTGTAAGTTGG | Novel | NGA |
| AGAACATCACATCAGGATTC | Novel | NNAGGA |
| AGAAGAACCAACAAGAAGAT | Novel | NAG |
| AGAAGAACTCCCTCGCCTCG | Novel | NAG |
| AGAAGATCTCGTACTGAAGG | Novel | NAA |
| AGAAGATGAGGCATAGCAGC | Novel | NGG |
| AGAAGATTGACGATAAGGGA | Novel | NAG |
| AGAAGGGGACGAGAGAGTCC | Novel | NAA |
| AGAAGGGGTCCTAGGAATCC | Novel | NGA |
| AGAAGTCAGAAGGCAAAAAC | Novel | NAG |
| AGAATCCTCACAATACCGCA | Novel | NAG |
| AGACAAAAGAAAATTGGTAA | Novel | NAG |
| AGACAAAAGAAAATTGGTAAC | Novel | NNNRRT |
| AGACAAGAAATGTGAAACCA | Novel | NAA |
| AGACAAGAAATGTGAAACCAC | Novel | NNGRRT |
| AGACAAGAAATGTGAAACCAC | Novel | NNNRRT |
| AGACACACGGTAGTTCCCCC | Novel | NAG |
| AGACACATCCAGCGATAACC | Novel | NGG |
| AGACACCAAATACTCTATAA | Novel | NGG |
| AGACAGGTACAGTAGAAGAA | Novel | NAA |
| AGACCACCGTGAACGCCCAC | Novel | NGA |
| AGACCTGCTGCGAGCAAAAC | Novel | NAG |
| AGACCTTCGTCTGCGAGGCG | Novel | NGG |
| AGACCTTCGTCTGCGAGGCGA | Novel | NNGRRT |
| AGACCTTCGTCTGCGAGGCGA | Novel | NNNRRT |
| AGACCTTGGGCAACATTCGG | Novel | NGG |
| AGACGACGAGGCAGGTCCCC | Novel | NAG |
| AGACGGAGAAGGGGACGAGA | Novel | NAG |
| AGACGGGGAGTCCGCGTAAA | Novel | NAG |
| AGACGGGGAGTCCGCGTAAAG | Novel | NNNRRT |
| AGACTGGGAGGAGTTGGGGG | Novel | NGG |
| AGACTGGGAGGAGTTGGGGGA | Novel | NNNRRT |
| AGACTGTTTGTTTAAAGACT | Novel | NGG |
| AGAGAAGTCCACCACGAGTC | Novel | NAG |
| AGAGAGGTGCGCCCCGTGGT | Novel | NGG |
| AGAGAGTCCCAAGCGACCCC | Novel | NAG |
| AGAGATGATTAGGCAGAGGT | Novel | NAA |
| AGAGCAAACACAGCAAATCC | Novel | NGA |
| AGAGCTGAGGCGGTATCTAG | Novel | NAG |
| AGAGGAAGATGATAAAACGC | Novel | NGC |
| AGAGGCCTGTATTTCCCTGC | Novel | NGG |
| AGAGTATTTGGTGTCTTTCG | Novel | NAG |
| AGAGTCCCAAGCGACCCCGA | Novel | NAA |
| AGAGTCCCAAGCGACCCCGAG | Novel | NNGRRT |
| AGAGTCCCAAGCGACCCCGAG | Novel | NNNRRT |
| AGAGTTTGGTGAAAGGTTGT | Novel | NGA |
| AGATCCAGCATCTAGAGACC | Novel | NAG |
| AGATCCAGCATCTAGAGACCT | Novel | NNNRRT |
| AGATCTCGTACTGAAGGAAA | Novel | NAA |
| AGATCTTCTAGATACCGCCT | Novel | NAG |
| AGATCTTGTTCCCAAGAATA | Novel | NGG |
| AGATGAGAAGGCACAGACGG | Novel | NGA |
| AGATGATTAGGCAGAGGTGA | Novel | NAA |
| AGATGCTGGATCTTCCAAAT | Novel | NAA |
| AGATGCTGTACAGACTTGGCC | Novel | NNNRRT |
| AGATTAAAGGTCTTTGTACT | Novel | NGG |
| AGATTGAATACATGCATACA | Novel | NGG |
| AGATTGCAATTGATTATGCC | Novel | NGC |
| AGCAAAACCCAAAAGACCCA | Novel | NAA |
| AGCAAATCCGCCTCCTGCCT | Novel | NNACCA |
| AGCAACAGGAGGGATACATA | Novel | NAG |
| AGCAATTCTTTGCTGGGGGGA | Novel | NNNRRT |
| AGCAGTAGTCATGCAGGTTC | Novel | NGC |
| AGCCACCAGCAGGGAAATAC | M56 | NGG |
| AGCCACCCAAGGCACAGCTT | M72 | NGA |
| AGCCAGGAGAAACGGGCTGA | Novel | NGC |
| AGCCCAGGATGATGGGATGG | Novel | NAA |
| AGCCCTACGAACCACTGAAC | Novel | NAA |
| AGCCGAAAAGGTTCCACGCA | Novel | NGC |
| AGCCTGAGGGCTCCACCCCA | Novel | NAA |
| AGCCTTCAGAGCAAACACAG | Novel | NAA |
| AGCGATAACCAGGACAAGTT | Novel | NGA |
| AGCGATAACCAGGACAAGTT | Novel | NNAGGA |
| AGCGCAGGGTCCCCAATCCT | Novel | NGA |
| AGCGCCGACGGGACGTAAAC | Novel | NAA |
| AGCGCCGACGGGACGTAAAC | Novel | NNAGGA |
| AGCGGCTAGGAGTTCCGCAGT | Novel | NNGRRT |
| AGCGGCTAGGAGTTCCGCAGT | Novel | NNNRRT |
| AGCTCCAAATTCTTTATAAGG | Novel | NNNRRT |
| AGCTCTGTATCGGGAAGCCT | Novel | NAG |
| AGCTGTGCCTTGGGTGGCTT | Novel | NGG |
| AGCTTGGAGGCTTGAACAGT | Novel | NGG |
| AGGAAAGAAGTCAGAAGGCA | Novel | NAA |
| AGGAAGATGATAAAACGCCG | Novel | NAG |
| AGGAAGTTTTCTAAAACATTC | Novel | NNNRRT |
| AGGAATTTTCCGAAAGCCCA | Novel | NGA |
| AGGAATTTTCCGAAAGCCCAG | Novel | NNNRRT |
| AGGACAAGTTGGAGGACAGG | Novel | NGG |
| AGGACCCCTTCTCGTGTTAC | Novel | NGG |
| AGGACGTCCCGCGCAGGATC | Novel | NAG |
| AGGAGCAGTAAACCCTGTTC | Novel | NGA |
| AGGAGCTGGAGCATTCGGGC | Novel | NGG |
| AGGAGGCGGATTTGCTGGCA | Novel | NAG |
| AGGAGGCTGTAGGCATAAAT | E3 | NGG |
| AGGAGGTTGGTGAGTGATTG | Novel | NAG |
| AGGAGTGCGAATCCACACTC | Novel | NGA |
| AGGAGTTCCGCAGTATGGAT | E4 | NGG |
| AGGAGTTGGGGGAGGAGATT | Novel | NGA |
| AGGATCCTCAACCACCAGCA | Novel | NGG |
| AGGATCCTGGAATTAGAGGA | Novel | NAA |
| AGGATGAAGAGGAAGATGAT | Novel | NAA |
| AGGATGATGGGATGGGAATA | Novel | NAG |
| AGGATTAAAGACAGGTACAG | Novel | NAG |
| AGGATTCTTGTCAACAAGAA | Novel | NAA |
| AGGATTGGGGACCCTGCGCT | Novel | NAA |
| AGGCAAAAACGAGAGTAACTC | Novel | NNNRRT |
| AGGCAAGCAATTCTTTGCTG | M43 | NGG |
| AGGCAGGAGGCGGATTTGCT | Novel | NGC |
| AGGCAGGTCCCCTAGAAGAA | Novel | NAA |
| AGGCATAGCAGCAGGATGAA | Novel | NAG |
| AGGCCCACTTACAGTTAATG | Novel | NGA |
| AGGCCTCCGTGCGGTGGGGT | Novel | NAA |
| AGGCCTTGTAAGTTGGCGAG | Novel | NAA |
| AGGCGAGGGAGTTCTTCTTC | Novel | NAG |
| AGGCGGGTATATTATATAAG | Novel | NGA |
| AGGCTGCCTTCCTGTCTGGCG | Novel | NNNRRT |
| AGGCTTCCCGATACAGAGCT | Novel | NAG |
| AGGCTTGAACAGTAGGACAT | Novel | NAA |
| AGGGACTCAAGATGCTGTAC | Novel | NGA |
| AGGGAGAGGCAGTAGTCGGAA | Novel | NNGRRT |
| AGGGAGAGGCAGTAGTCGGAA | Novel | NNNRRT |
| AGGGATACATAGAGGTTCCT | Novel | NGA |
| AGGGCTTTCCCCCACTGTTT | Novel | NGC |
| AGGGGACCTGCCTCGTCGTC | Novel | NAA |
| AGGGGCATTTGGTGGTCTAT | Novel | NAG |
| AGGGTCCCCAATCCTCGAGA | M86 | NGA |
| AGGGTCGATGTCCATGCCCC | Novel | NAA |
| AGGGTTTAAATGTATACCCA | Novel | NAG |
| AGGGTTTACTGCTCCTGAAC | Novel | NGG |
| AGGTACAGTAGAAGAATAAAG | Novel | NNNRRT |
| AGGTAGGAGCTGGAGCATTC | Novel | NGG |
| AGGTATGTTGCCCGTTTGTCC | Novel | NNNRRT |
| AGGTATTGTTTACACAGAAA | Novel | NGC |
| AGGTCGGTCGTTGACATTGC | Novel | NGA |
| AGGTCGGTCGTTGACATTGCA | Novel | NNGRRT |
| AGGTCGGTCGTTGACATTGCA | Novel | NNNRRT |
| AGGTCTCAATCGCCGCGTCG | Novel | NAG |
| AGGTCTGGAGCAAACATTAT | Novel | NGG |
| AGGTGCGCCCCGTGGTCGGT | Novel | NGG |
| AGGTGTCCTTGTTGGGATTG | Novel | NAG |
| AGGTTCAGGTATTGTTTACA | Novel | NAG |
| AGGTTCCACGCACGCGCTGA | Novel | NGG |
| AGGTTGGGGACTGCGAATTT | Novel | NGG |
| AGGTTTGGTACAGCAACAGG | Novel | NGG |
| AGGTTTTATCCAAAGGTTAC | Novel | NAA |
| AGTAAAGTTCCCCACCTTAT | Novel | NAG |
| AGTAACTCCACAGTAGCTCC | Novel | NAA |
| AGTAATGATTAACTAGATGTT | Novel | NNGRRT |
| AGTAATGATTAACTAGATGTT | Novel | NNNRRT |
| AGTAGAAGAATAAAGACCAG | Novel | NAA |
| AGTAGCTCCAAATTCTTTAT | Novel | NAG |
| AGTAGGACATGAACAAGAGA | Novel | NGA |
| AGTAGTTTCCGGAAGTGTTG | Novel | NNAGGA |
| AGTAGTTTCCGGAAGTGTTGA | Novel | NNGRRT |
| AGTAGTTTCCGGAAGTGTTGA | Novel | NNNRRT |
| AGTCATTAGTTCCCCCCAGC | Novel | NAA |
| AGTCATTAGTTCCCCCCAGCA | Novel | NNGRRT |
| AGTCATTAGTTCCCCCCAGCA | Novel | NNNRRT |
| AGTCCAAGAGTCCTCTTATG | Novel | NAA |
| AGTCCAAGGAATACTAACAT | M78 | NGA |
| AGTCCAGAAGAACCAACAAG | Novel | NAG |
| AGTCCCAAGCGACCCCGAGA | Novel | NGG |
| AGTCCCCAACCTCCAATCAC | Novel | NNACCA |
| AGTCCCGATAATGTTTGCTC | Novel | NAG |
| AGTCCGCGTAAAGAGAGGTG | Novel | NGC |
| AGTCCTCTTATGTAAGACCT | Novel | NGG |
| AGTCTTTAAACAAACAGTCTT | Novel | NNNRRT |
| AGTCTTTGAAGTATGCCTCA | Novel | NGG |
| AGTGAAAGCCTGCTTAGATT | Novel | NAA |
| AGTGATTGGAGGTTGGGGAC | Novel | NGC |
| AGTGATTGGAGGTTGGGGACT | Novel | NNGRRT |
| AGTGATTGGAGGTTGGGGACT | Novel | NNNRRT |
| AGTGCACACGGTCCGGCAGA | Novel | NGA |
| AGTGCGAATCCACACTCCGA | Novel | NAG |
| AGTGTCTAGTTTGGAAGTAA | Novel | NGA |
| AGTGTGGATTCGCACTCCTC | Novel | NAG |
| AGTGTTGATAGGATAGGGGCA | Novel | NNNRRT |
| AGTTAATGAGAAAAGAAGAT | Novel | NGC |
| AGTTATGGGTCCTTGCCACA | Novel | NGA |
| AGTTATGTCAACACTAATAT | Novel | NGG |
| AGTTCCCCACCTTATGAGTC | Novel | NAA |
| AGTTCCCCACCTTATGAGTC | Novel | NNAGGA |
| AGTTCCCCCCAGCAAAGAAT | Novel | NGC |
| AGTTCCCCCTAGAAAATTGA | Novel | NAG |
| AGTTCCCCCTAGAAAATTGAG | Novel | NNNRRT |
| AGTTCCGCAGTATGGATCGG | Novel | NAG |
| AGTTCTTCTTCTAGGGGACC | Novel | NGC |
| AGTTGCATGGTGCTGGTGCG | Novel | NAG |
| AGTTGGCAGCACAGCCTAGC | Novel | NGC |
| AGTTTCCGGAAGTGTTGATA | Novel | NGA |
| ATAAAGAATTTGGAGCTACTG | Novel | NNGRRT |
| ATAAAGAATTTGGAGCTACTG | Novel | NNNRRT |
| ATAAATTGGTCTGCGCACCA | Novel | NNACCA |
| ATAACCACATTGTGTAAATG | Novel | NGG |
| ATAACTCTGTTGTCCTCTCC | Novel | NGC |
| ATAACTCTGTTGTCCTCTCCC | Novel | NNNRRT |
| ATAACTGAAAGCCAAACAGT | Novel | NGG |
| ATAACTGACTACTAGGTCTC | Novel | NAG |
| ATAAGAGAGAAACAACACAT | Novel | NGC |
| ATAAGGGAGAGGCAGTAGTC | Novel | NGA |
| ATAATATACCCGCCTTCCAT | Novel | NGA |
| ATACAGGTGCAATTTCCGTC | Novel | NGA |
| ATACAGGTGCAATTTCCGTCC | Novel | NNNRRT |
| ATACATAGAGGTTCCTTGAG | Novel | NAG |
| ATACATAGAGGTTCCTTGAGC | Novel | NNNRRT |
| ATACATGCATACAAGGGCAT | Novel | NAA |
| ATACCGCCTCAGCTCTGTAT | Novel | NGG |
| ATACGATGTATATTTGCGGG | Novel | NGA |
| ATACGATGTATATTTGCGGG | Novel | NNAGGA |
| ATACTAACATTGAGGTTCCC | Novel | NAG |
| ATACTACAAACTTTGCCAGC | Novel | NAA |
| ATAGAGTATTTGGTGTCTTT | Novel | NGG |
| ATAGCAGCAGGATGAAGAGG | Novel | NAG |
| ATAGCGCCTCATTTTGTGGG | Novel | NNACCA |
| ATAGGAATTTTCCGAAAGCC | Novel | NAG |
| ATAGTCCAGAAGAACCAACA | Novel | NGA |
| ATAGTCCAGAAGAACCAACAA | Novel | NNNRRT |
| ATATAATATACCCGCCTTCCA | Novel | NNGRRT |
| ATATAATATACCCGCCTTCCA | Novel | NNNRRT |
| ATATACATCGTATCCATGGC | Novel | NGC |
| ATATGGATGATGTGGTATTG | Novel | NGG |
| ATATGGGCCTAAAGTTCAGG | Novel | NAA |
| ATATGGTGACCCACAAAATG | Novel | NGG |
| ATATTTGCGGGAGAGGACAA | Novel | NAG |
| ATATTTGGTAACCTTTGGAT | Novel | NAA |
| ATCAATAGGCCTGTTAATAG | Novel | NAA |
| ATCCAAAGGTTACCAAATAT | Novel | NNACCA |
| ATCCAACTGGTGGTCGGGAA | Novel | NGA |
| ATCCAATGGTAAATATTTGG | Novel | NAA |
| ATCCACACTCCGAAAGACAC | Novel | NAA |
| ATCCAGTTGGCAGCACAGCC | Novel | NAG |
| ATCCATACTGCGGAACTCCT | Novel | NGC |
| ATCCCAGAGGATTGCTGGTG | Novel | NAA |
| ATCCCAGAGGATTGCTGGTGG | Novel | NNNRRT |
| ATCCCATCATCCTGGGCTTT | Novel | NGG |
| ATCCCTCCTGTTGCTGTACC | Novel | NAA |
| ATCCTCGAGAAGATTGACGA | Novel | NAA |
| ATCCTGCGGACGACCCTTCT | Novel | NGG |
| ATCGACCCTTATAAAGAATT | Novel | NGG |
| ATCTAGAAGATCTCGTACTG | Novel | NAG |
| ATCTAGTTAATCATTACTTC | Novel | NAA |
| ATCTCTTTGTTTTGTTAGGGT | Novel | NNNRRT |
| ATCTTCCAAATTAACACCCAC | Novel | NNNRRT |
| ATCTTCTGCGACGCGGCGAT | Novel | NGA |
| ATCTTCTTGTTGGTTCTTCT | Novel | NGA |
| ATCTTGCAGAGTTTGGTGAA | Novel | NGG |
| ATCTTTCCACCAGCAATCCTC | Novel | NNGRRT |
| ATCTTTCCACCAGCAATCCTC | Novel | NNNRRT |
| ATGAACAAGAGATGATTAGG | Novel | NAG |
| ATGAACAAGAGATGATTAGGC | Novel | NNNRRT |
| ATGACATAACCCATAAAATT | Novel | NAG |
| ATGACCAAGCCCCAGCCAGT | Novel | NGG |
| ATGACTCTAGCTACCTGGGT | Novel | NGG |
| ATGAGGATTAAAGACAGGTA | Novel | NAG |
| ATGAGGCATAGCAGCAGGAT | Novel | NAA |
| ATGAGTGTTTCTCAAAGGTG | Novel | NAG |
| ATGATGGGATGGGAATACAGG | Novel | NNNRRT |
| ATGATGTGGTATTGGGGGCC | Novel | NAG |
| ATGATGTGTTCTTGTGGCAA | Novel | NGA |
| ATGATTAGGCAGAGGTGAAA | Novel | NAG |
| ATGCATACAAGGGCATTAAC | Novel | NNAGGA |
| ATGCATACAAGGGCATTAACG | Novel | NNGRRT |
| ATGCATACAAGGGCATTAACG | Novel | NNNRRT |
| ATGCATGTATTCAATCTAAG | Novel | NAG |
| ATGCCTACAGCCTCCTAGTA | Novel | NAA |
| ATGCCTGCTAGGTTTTATCC | Novel | NAA |
| ATGCGACGTGCAGAGGTGAAG | Novel | NNNRRT |
| ATGCTGTAGATCTTGTTCCC | Novel | NAG |
| ATGGACATCGACCCTTATAA | Novel | NGA |
| ATGGATACGATGTATATTTG | Novel | NGG |
| ATGGATCGGCAGAGGAGCCG | Novel | NAA |
| ATGGATCGGCAGAGGAGCCGA | Novel | NNNRRT |
| ATGGATGATGTGGTATTGGG | Novel | NGC |
| ATGGCACTAGTAAACTGAGC | Novel | NAG |
| ATGGCCCATGACCAAGCCCC | Novel | NGC |
| ATGGCCCATGACCAAGCCCCA | Novel | NNNRRT |
| ATGGGATGGGAATACAGGTG | Novel | NAA |
| ATGGGCCATCAGCGCGTGCG | Novel | NGG |
| ATGGGGCAGAATCTTTCCAC | Novel | NAG |
| ATGGGGCAGAATCTTTCCACC | Novel | NNNRRT |
| ATGGGGCAGCAAAACCCAAA | Novel | NGA |
| ATGGTAAATATTTGGTAACCT | Novel | NNGRRT |
| ATGGTAAATATTTGGTAACCT | Novel | NNNRRT |
| ATGGTCCCGTGCTGGTGGTT | Novel | NAG |
| ATGGTGAGGTGAACAATGCT | Novel | NAG |
| ATGTATACCCAAAGACAAAA | Novel | NAA |
| ATGTCAACACTAATATGGGCC | Novel | NNNRRT |
| ATGTCAACGACCGACCTTGA | Novel | NGC |
| ATGTGATGTTCTCCATGTTC | Novel | NGC |
| ATGTGGTTATCCTGCGTTAA | Novel | NGC |
| ATGTTCTCCATGTTCAGCGC | Novel | NGG |
| ATGTTCTGGATAATAAGGTT | Novel | NAA |
| ATGTTGCCCAAGGTCTTACA | Novel | NAA |
| ATTAAAGACAGGTACAGTAG | Novel | NAG |
| ATTAAAGGTCTTTGTACTAG | Novel | NAG |
| ATTAACACCCACCCAGGTAGC | Novel | NNGRRT |
| ATTAACACCCACCCAGGTAGC | Novel | NNNRRT |
| ATTAACAGGCCTATTGATTG | Novel | NAA |
| ATTAACTGTAAGTGGGCCTA | Novel | NAA |
| ATTCAGCGCCGACGGGACGT | Novel | NAA |
| ATTCCAGGATCCTCAACCAC | Novel | NAG |
| ATTCCCATCCCATCATCCTG | Novel | NGC |
| ATTCCTATGGGAGTGGGCCT | Novel | NAG |
| ATTCCTTGGACTCATAAGGT | Novel | NGG |
| ATTCGCACTCCTCCAGCTTA | Novel | NAG |
| ATTCTTGGGAACAAGATCTA | Novel | NAG |
| ATTCTTTCCCGACCACCAGT | Novel | NGG |
| ATTGAATACATGCATACAAG | Novel | NGC |
| ATTGAGACCTTCGTCTGCGA | Novel | NGC |
| ATTGAGATCTTCTGCGACGC | Novel | NGC |
| ATTGGGACTTCAATCCCAAC | Novel | NAG |
| ATTGGGGGCCAAGTCTGTAC | Novel | NGC |
| ATTGGTAACAGCGGTAAAAA | Novel | NGG |
| ATTGTGAGGATTCTTGTCAA | Novel | NAA |
| ATTGTGGGTCTTTTGGGTTT | Novel | NGC |
| ATTGTGTAAATGGGGCAGCA | Novel | NAA |
| ATTTAAACCCTAACAAAACA | Novel | NAG |
| ATTTAAACCCTAACAAAACAA | Novel | NNNRRT |
| ATTTACACCAAGACATTATC | Novel | NAA |
| ATTTACACCAAGACATTATCA | M16 | NNNRRT |
| ATTTCTTGTCTCACTTTTGG | Novel | NAG |
| ATTTGCGGGAGAGGACAACA | Novel | NAG |
| ATTTGCTGTGTTTGCTCTGA | Novel | NGG |
| ATTTGGAAGATCCAGCATCT | Novel | NGA |
| ATTTGGTGGTCTATAAGCTG | Novel | NAG |
| ATTTGGTGGTCTATAAGCTGG | Novel | NNGRRT |
| ATTTGGTGGTCTATAAGCTGG | Novel | NNNRRT |
| ATTTGGTGTCTTTCGGAGTG | Novel | NGG |
| ATTTGTTCAGTGGTTCGTAG | Novel | NGC |
| ATTTTATGGGTTATGTCATT | Novel | NGA |
| ATTTTGGCCAAGACACACGG | Novel | NAG |
| ATTTTTTGATAATGTCTTGGT | Novel | NNNRRT |
| CAAAAAATCAAAGAATGTTT | Novel | NAG |
| CAAAAAATGTGAACAGTTTG | Novel | NAG |
| CAAAAACGAGAGTAACTCCA | Novel | NAG |
| CAAAAGAAAATTGGTAACAG | Novel | NGG |
| CAAAAGGCCTCCGTGCGGTG | Novel | NGG |
| CAAAAGTGAGACAAGAAATG | Novel | NGA |
| CAAAATTCGCAGTCCCCAACC | Novel | NNNRRT |
| CAAACACAGCAAATCCAGAT | Novel | NGG |
| CAAACACTTGGCACAGACCT | Novel | NGC |
| CAAAGAATTGCTTGCCTGAG | Novel | NGC |
| CAAAGACAAAAGAAAATTGG | Novel | NAA |
| CAAAGGACGTCCCGCGCAGGA | Novel | NNNRRT |
| CAAAGGTGGAGACAGCGGGG | Novel | NAG |
| CAAAGTTTGTAGTATGCCCT | Novel | NAG |
| CAAATATACATCGTATCCAT | Novel | NGC |
| CAAATATTTACCATTGGATA | Novel | NGG |
| CAAATGGCACTAGTAAACTG | Novel | NGC |
| CAAATTAACACCCACCCAGG | Novel | NAG |
| CAACACATAGCGCCTCATTTT | Novel | NNGRRT |
| CAACACATAGCGCCTCATTTT | Novel | NNNRRT |
| CAACATACCTTGATAGTCCA | Novel | NAA |
| CAACATTCGGTGGGCGTTCA | Novel | NGG |
| CAACATTCGGTGGGCGTTCAC | Novel | NNNRRT |
| CAACCACCAGCACGGGACCA | Novel | NGC |
| CAACCTTTCACCAAACTCTG | Novel | NAA |
| CAACGAATTGTGGGTCTTTT | M62 | NGG |
| CAACTTGTCCTGGTTATCGC | Novel | NGG |
| CAAGAAATGTGAAACCACAA | Novel | NAG |
| CAAGAAGATGAGGCATAGCA | Novel | NNAGGA |
| CAAGAAGATGAGGCATAGCAG | Novel | NNGRRT |
| CAAGAAGATGAGGCATAGCAG | Novel | NNNRRT |
| CAAGAATATGGTGACCCACA | Novel | NAA |
| CAAGAATCCTCACAATACCG | Novel | NAG |
| CAAGACATTATCAAAAAATG | Novel | NGA |
| CAAGAGTTGCCTGAACTTTA | Novel | NGC |
| CAAGATCTACAGCATGGGGC | Novel | NGA |
| CAAGCAATTCTTTGCTGGGG | Novel | NGA |
| CAAGCCTCCAAGCTGTGCCT | E5 | NGG |
| CAAGGACCCATAACTTCCAA | Novel | NGA |
| CAAGGCACAGCTTGGAGGCT | E6 | NGA |
| CAAGTTGGAGGACAGGAGGT | Novel | NGG |
| CAATACCGCAGAGTCTAGACT | M1 | NNNRRT |
| CAATCAATAGGCCTGTTAAT | Novel | NGG |
| CAATCAATAGGCCTGTTAATA | Novel | NNNRRT |
| CAATCCCAACAAGGACACCT | Novel | NGC |
| CAATCGCCAGACAGGAAGGC | Novel | NGC |
| CAATCTGGATTTGCTGTGTT | Novel | NGC |
| CAATGCTCAGGAGACTCTAA | Novel | NGC |
| CAATGTCAACGACCGACCTT | Novel | NAG |
| CAATTCGTTGACATACTTTC | Novel | NAA |
| CACAACCTTTCACCAAACTC | Novel | NGC |
| CACAAGAACACATCATACAA | Novel | NAA |
| CACAAGAGTTGCCTGAACTT | Novel | NAG |
| CACACGGTAGTTCCCCCTAG | Novel | NAA |
| CACACGGTCCGGCAGATGAG | Novel | NAG |
| CACAGAAAGGCCTTGTAAGT | Novel | NGG |
| CACAGACCTGGCCGTTGCCG | Novel | NGC |
| CACAGACGGGGAGTCCGCGT | Novel | NAA |
| CACATAGCGCCTCATTTTGT | Novel | NGG |
| CACATCATACAAAAAATCAA | Novel | NGA |
| CACATCATCCATATAACTGA | Novel | NAG |
| CACATTTCTTGTCTCACTTT | Novel | NGG |
| CACATTTTTTGATAATGTCT | Novel | NGG |
| CACCAAACTCTGCAAGATCC | Novel | NAG |
| CACCAATCGCCAGACAGGAA | Novel | NGC |
| CACCACGAGTCTAGACTCTG | M36 | NGG |
| CACCAGCACGGGACCATGCC | Novel | NAA |
| CACCAGTTGGATCCAGCCTT | Novel | NAG |
| CACCATACTGCACTCAGGCA | Novel | NGC |
| CACCCAAGGCACAGCTTGGA | Novel | NGC |
| CACCCCAAAAGGCCTCCGTG | Novel | NGG |
| CACCGCACGGAGGCCTTTTG | Novel | NGG |
| CACCTCACCATACTGCACTC | Novel | NGG |
| CACCTCTGCACGTCGCATGG | Novel | NGA |
| CACCTCTGCACGTCGCATGG | Novel | NNACCA |
| CACCTGGCCAGACGCCAACA | Novel | NGG |
| CACGGAGGCCTTTTGGGGTG | Novel | NAG |
| CACGGTCCGGCAGATGAGAA | Novel | NGC |
| CACTAGTAAACTGAGCCAGG | Novel | NGA |
| CACTATTTACACACTCTATG | Novel | NAA |
| CACTCAGGCAAGCAATTCTT | Novel | NGC |
| CACTCCCATAGGAATTTTCC | Novel | NAA |
| CACTGAACAAATGGCACTAG | Novel | NAA |
| CACTGGCTGGGGCTTGGTCA | Novel | NGG |
| CACTGTTTGGCTTTCAGTTAT | Novel | NNGRRT |
| CACTGTTTGGCTTTCAGTTAT | Novel | NNNRRT |
| CACTTACAGTTAATGAGAAA | Novel | NGA |
| CACTTACAGTTAATGAGAAAA | Novel | NNNRRT |
| CACTTTCTCGCCAACTTACA | Novel | NGG |
| CAGAAGAACCAACAAGAAGA | Novel | NGA |
| CAGACACATCCAGCGATAAC | Novel | NAG |
| CAGACCTGCTGCGAGCAAAA | Novel | NAA |
| CAGACCTGGCCGTTGCCGGG | Novel | NAA |
| CAGACGAAGGTCTCAATCGC | Novel | NGC |
| CAGACGGAGAAGGGGACGAG | Novel | NGA |
| CAGACGGGGAGTCCGCGTAA | Novel | NGA |
| CAGAGCAAACACAGCAAATC | Novel | NAG |
| CAGAGCTGAGGCGGTATCTA | Novel | NAA |
| CAGAGTTTGGTGAAAGGTTG | Novel | NGG |
| CAGATGAGAAGGCACAGACG | Novel | NGG |
| CAGCAAAGAATTGCTTGCCT | Novel | NAG |
| CAGCAACAGGAGGGATACAT | Novel | NGA |
| CAGCACAGCCTAGCAGCCAT | Novel | NGA |
| CAGCAGGATGAAGAGGAAGA | Novel | NGA |
| CAGCATGGGGCAGAATCTTT | Novel | NNACCA |
| CAGCCAGTGGGGGTTGCGTC | Novel | NGC |
| CAGCCTAGCAGCCATGGATA | Novel | NGA |
| CAGCCTCCTAGTACAAAGACC | Novel | NNNRRT |
| CAGCGATAACCAGGACAAGT | Novel | NGG |
| CAGCGCCGACGGGACGTAAA | Novel | NAA |
| CAGCGGTAAAAAGGGACTCA | Novel | NGA |
| CAGCTCTGTATCGGGAAGCCT | Novel | NNGRRT |
| CAGCTCTGTATCGGGAAGCCT | Novel | NNNRRT |
| CAGCTTGGAGGCTTGAACAG | Novel | NAG |
| CAGGACAAGTTGGAGGACAG | Novel | NAG |
| CAGGAGACTCTAAGGCTTCC | Novel | NGA |
| CAGGAGGCGGATTTGCTGGC | Novel | NAA |
| CAGGAGGTTGGTGAGTGATT | Novel | NGA |
| CAGGATCCAGTTGGCAGCAC | Novel | NGC |
| CAGGATGAAGAGGAAGATGA | Novel | NAA |
| CAGGCAAGCAATTCTTTGCT | M42 | NGG |
| CAGGGTCCCCAATCCTCGAG | Novel | NAG |
| CAGGTACAGTAGAAGAATAA | Novel | NGA |
| CAGGTACAGTAGAAGAATAA | Novel | NNACCA |
| CAGGTATTGTTTACACAGAA | Novel | NGG |
| CAGGTGCAATTTCCGTCCGA | Novel | NGG |
| CAGGTGTCCTTGTTGGGATT | Novel | NAA |
| CAGTAAAGTTCCCCACCTTA | Novel | NGA |
| CAGTAGAAGAATAAAGACCAG | Novel | NNNRRT |
| CAGTAGCTCCAAATTCTTTA | Novel | NAA |
| CAGTAGCTCCAAATTCTTTAT | Novel | NNGRRT |
| CAGTAGCTCCAAATTCTTTAT | Novel | NNNRRT |
| CAGTATGGTGAGGTGAACAA | Novel | NGC |
| CAGTCTTTGAAGTATGCCTC | Novel | NAG |
| CAGTTAATGAGAAAAGAAGAT | Novel | NNNRRT |
| CAGTTATGTCAACACTAATA | Novel | NGG |
| CAGTTGGATCCAGCCTTCAG | Novel | NGC |
| CAGTTGGCAGCACAGCCTAG | Novel | NAG |
| CAGTTTGTAGGCCCACTTACA | Novel | NNNRRT |
| CATAAATTGGTCTGCGCACC | Novel | NGC |
| CATAACCCATAAAATTCAGA | Novel | NAG |
| CATAAGGTGGGGAACTTTAC | Novel | NGG |
| CATACAAGGGCATTAACGCA | Novel | NGA |
| CATACCTTGATAGTCCAGAA | Novel | NAA |
| CATACCTTGATAGTCCAGAA | Novel | NNACCA |
| CATACTACAAACTTTGCCAG | Novel | NAA |
| CATACTGCGGAACTCCTAGC | Novel | NGC |
| CATAGAGGTTCCTTGAGCAG | Novel | NAG |
| CATAGCAGCAGGATGAAGAG | Novel | NAA |
| CATAGGAATTTTCCGAAAGC | Novel | NNAGGA |
| CATAGGAATTTTCCGAAAGCC | Novel | NNGRRT |
| CATAGGAATTTTCCGAAAGCC | Novel | NNNRRT |
| CATATTAGTGTTGACATAAC | Novel | NGA |
| CATCATCCTGGGCTTTCGGA | Novel | NAA |
| CATCCAGCGATAACCAGGAC | Novel | NAG |
| CATCCATATAACTGAAAGCC | Novel | NAA |
| CATCCATATAACTGAAAGCCA | M6 | NNNRRT |
| CATCGTATCCATGGCTGCTA | Novel | NGC |
| CATCTTCCTCTTCATCCTGC | Novel | NGC |
| CATCTTCTTGTTGGTTCTTC | Novel | NGG |
| CATCTTGAGTCCCTTTTTAC | Novel | NGC |
| CATGACCAAGCCCCAGCCAG | Novel | NGG |
| CATGACCAAGCCCCAGCCAGT | Novel | NNGRRT |
| CATGACCAAGCCCCAGCCAGT | Novel | NNNRRT |
| CATGCAACTTTTTCACCTCTG | M8 | NNNRRT |
| CATGCATACAAGGGCATTAA | Novel | NGC |
| CATGCCCCAAAGCCACCCAA | Novel | NGC |
| CATGCGACGTGCAGAGGTGA | Novel | NGC |
| CATGCTGTAGATCTTGTTCC | Novel | NAA |
| CATGCTGTAGATCTTGTTCCC | Novel | NNGRRT |
| CATGCTGTAGATCTTGTTCCC | Novel | NNNRRT |
| CATGGACATCGACCCTTATA | Novel | NAG |
| CATGGTCCCGTGCTGGTGGT | Novel | NGA |
| CATGGTCCCGTGCTGGTGGT | Novel | NNAGGA |
| CATGGTCCCGTGCTGGTGGTT | Novel | NNGRRT |
| CATGGTCCCGTGCTGGTGGTT | Novel | NNNRRT |
| CATGGTGCTGGTGCGCAGAC | Novel | NAA |
| CATGTTCAGCGCAGGGTCCC | Novel | NAA |
| CATTAGTTCCCCCCAGCAAA | Novel | NAA |
| CATTCGGTGGGCGTTCACGG | Novel | NGG |
| CATTGAGGTTCCCGAGATTG | Novel | NGA |
| CATTGGAAAACACCATCTTTT | Novel | NNNRRT |
| CATTGGAAGTTATGGGTCCT | Novel | NGC |
| CATTGTGTAAATGGGGCAGC | Novel | NAA |
| CATTGTTCACCTCACCATAC | Novel | NGC |
| CATTTAAACCCTAACAAAAC | Novel | NAA |
| CATTTACACCAAGACATTAT | Novel | NAA |
| CATTTCTTGTCTCACTTTTG | Novel | NAA |
| CATTTGGTGGTCTATAAGCT | Novel | NGA |
| CATTTGGTGGTCTATAAGCT | Novel | NNAGGA |
| CATTTGTTCAGTGGTTCGTA | Novel | NGG |
| CCAAAAGACCCACAATTCGT | Novel | NGA |
| CCAAAAGGCCTCCGTGCGGT | Novel | NGG |
| CCAAACCTTCGGACGGAAAT | Novel | NGC |
| CCAAACTCTGCAAGATCCCA | Novel | NAG |
| CCAAATATTTACCATTGGAT | Novel | NAG |
| CCAACAAGAAGATGAGGCAT | Novel | NGC |
| CCAAGAATATGGTGACCCAC | Novel | NAA |
| CCAAGTCTGTACAGCATCTT | Novel | NAG |
| CCAATACCACATCATCCATA | Novel | NAA |
| CCAATCAATAGGCCTGTTAA | Novel | NAG |
| CCAATCCTCGAGAAGATTGA | M84 | NGA |
| CCAATCGCCAGACAGGAAGG | Novel | NAG |
| CCAATGAGGATTAAAGACAGG | Novel | NNNRRT |
| CCACAAGAACACATCATACA | Novel | NAA |
| CCACAATTCGTTGACATACTT | Novel | NNNRRT |
| CCACATCATCCATATAACTG | Novel | NAA |
| CCACATTGTGTAAATGGGGC | Novel | NGC |
| CCACCAATCGCCAGACAGGA | M55 | NGG |
| CCACCAGCACGGGACCATGC | M90 | NGA |
| CCACCCAAGGCACAGCTTGG | M38 | NGG |
| CCACCGCACGGAGGCCTTTT | Novel | NGG |
| CCACTCCCATAGGAATTTTC | M69 | NGA |
| CCACTGCATGGCCTGAGGAT | Novel | NAG |
| CCACTTACAGTTAATGAGAA | Novel | NAG |
| CCAGACGCCAACAAGGTAGG | Novel | NGC |
| CCAGAGGATTGCTGGTGGAA | Novel | NGA |
| CCAGATTGGGACTTCAATCC | Novel | NAA |
| CCAGCAAAGAATTGCTTGCC | M73 | NGA |
| CCAGCATCTAGAGACCTAGTA | Novel | NNNRRT |
| CCAGCCAGTGGGGGTTGCGT | Novel | NAG |
| CCAGCCTTCAGAGCAAACAC | Novel | NGC |
| CCAGCCTTCAGAGCAAACACA | M22 | NNNRRT |
| CCAGCTTATAGACCACCAAA | Novel | NGC |
| CCAGGACAAGTTGGAGGACA | M88 | NGA |
| CCAGGATGATGGGATGGGAAT | Novel | NNNRRT |
| CCAGGTCTGTGCCAAGTGTT | Novel | NGC |
| CCAGGTGTCCTTGTTGGGAT | Novel | NGA |
| CCAGTGGGGGTTGCGTCAGC | Novel | NAA |
| CCAGTTGGATCCAGCCTTCA | Novel | NAG |
| CCATACTGCACTCAGGCAAG | Novel | NAA |
| CCATAGAGTGTGTAAATAGTG | Novel | NNNRRT |
| CCATATAACTGAAAGCCAAA | Novel | NAG |
| CCATCATCCTGGGCTTTCGG | Novel | NAA |
| CCATGCAACTTTTTCACCTC | Novel | NGC |
| CCATGCCCCAAAGCCACCCA | M40 | NGG |
| CCATGCGACGTGCAGAGGTG | Novel | NAG |
| CCATGGATACGATGTATATT | Novel | NGC |
| CCATGGCTGCTAGGCTGTGC | Novel | NGC |
| CCATTTGTTCAGTGGTTCGT | Novel | NGG |
| CCCAAAAGGCCTCCGTGCGG | Novel | NGG |
| CCCAAAGCCACCCAAGGCAC | Novel | NGC |
| CCCAACAAGGACACCTGGCC | M81 | NGA |
| CCCAACCTCCAATCACTCAC | Novel | NAA |
| CCCAACTCCTCCCAGTCTTT | Novel | NAA |
| CCCAAGAATATGGTGACCCA | Novel | NAA |
| CCCACCCAGGTAGCTAGAGTC | M11 | NNNRRT |
| CCCACCGCACGGAGGCCTTT | Novel | NGG |
| CCCACTTACAGTTAATGAGA | Novel | NAA |
| CCCAGAGGATTGCTGGTGGA | Novel | NAG |
| CCCATCATCCTGGGCTTTCG | Novel | NAA |
| CCCATCTCTTTGTTTTGTTA | M59 | NGG |
| CCCCAAAAGGCCTCCGTGCGG | Novel | NNGRRT |
| CCCCAAAAGGCCTCCGTGCGG | Novel | NNNRRT |
| CCCCAAAGCCACCCAAGGCA | Novel | NAG |
| CCCCAACTCCTCCCAGTCTT | Novel | NAA |
| CCCCACCGCACGGAGGCCTTT | Novel | NNGRRT |
| CCCCACCGCACGGAGGCCTTT | Novel | NNNRRT |
| CCCCACCTTATGAGTCCAAG | Novel | NAA |
| CCCCAGCAAAGAATTGCTTGC | M10 | NNGRRT |
| CCCCAGCAAAGAATTGCTTGC | Novel | NNNRRT |
| CCCCATCTCTTTGTTTTGTT | M60 | NGG |
| CCCCCCAGCAAAGAATTGCT | Novel | NGC |
| CCCCGAGAAGGGTCGTCCGC | Novel | NGG |
| CCCCGCCTGTAACACGAGAA | Novel | NGG |
| CCCCGCTGTCTCCACCTTTG | Novel | NGA |
| CCCCGTTGCCCGGCAACGGC | Novel | NAG |
| CCCCTTCTCGTGTTACAGGC | Novel | NGG |
| CCCGACCACCAGTTGGATCC | Novel | NGC |
| CCCGAGAAGGGTCGTCCGCA | Novel | NGA |
| CCCGAGATTGAGATCTTCTG | Novel | NGA |
| CCCGCCTGTAACACGAGAAG | Novel | NGG |
| CCCGCCTTCCATAGAGTGTG | Novel | NAA |
| CCCGCGCAGGATCCAGTTGG | Novel | NAG |
| CCCGCTGTCTCCACCTTTGA | Novel | NAA |
| CCCGGCAACGGCCAGGTCTG | Novel | NGC |
| CCCGTCGGCGCTGAATCCTG | Novel | NGG |
| CCCGTCTGTGCCTTCTCATC | Novel | NGC |
| CCCGTGGTCGGTCGGAACGG | Novel | NAG |
| CCCGTTGCCCGGCAACGGCC | Novel | NGG |
| CCCGTTTGTCCTCTAATTCC | Novel | NGG |
| CCCTAACAAAACAAAGAGAT | Novel | NGG |
| CCCTAGAAGAAGAACTCCCT | Novel | NGC |
| CCCTATCCTATCAACACTTC | Novel | NGG |
| CCCTGCTGGTGGCTCCAGTT | Novel | NAG |
| CCCTTATCGTCAATCTTCTC | Novel | NAG |
| CCCTTCTCCGTCTGCCGTTC | Novel | NGA |
| CCCTTCTCGTGTTACAGGCG | Novel | NGG |
| CCGAAAAGGTTCCACGCACG | Novel | NGC |
| CCGAAAAGGTTCCACGCACGC | Novel | NNNRRT |
| CCGAAGGTTTGGTACAGCAA | Novel | NAG |
| CCGACCTTGAGGCATACTTC | Novel | NAA |
| CCGCAGGATTCAGCGCCGAC | Novel | NGG |
| CCGCAGTATGGATCGGCAGA | E7 | NGA |
| CCGCCTCAGCTCTGTATCGG | Novel | NAA |
| CCGCCTTCCATAGAGTGTGT | Novel | NAA |
| CCGCCTTCCATAGAGTGTGTA | M19 | NNNRRT |
| CCGCGCAGGATCCAGTTGGC | Novel | NGC |
| CCGCTGTCTCCACCTTTGAG | Novel | NAA |
| CCGCTTGTTTTGCTCGCAGC | Novel | NGG |
| CCGGAAGTGTTGATAGGATA | Novel | NGG |
| CCGGCAACGGCCAGGTCTGTG | M32 | NNNRRT |
| CCGTCGGCGCTGAATCCTGC | Novel | NGA |
| CCGTGCGGTGGGGTGAAACC | Novel | NAG |
| CCGTGGTCGGTCGGAACGGC | Novel | NGA |
| CCGTGTGTCTTGGCCAAAATT | Novel | NNNRRT |
| CCGTTGCCGGGCAACGGGGT | Novel | NAA |
| CCGTTTCTCCTGGCTCAGTTT | Novel | NNNRRT |
| CCGTTTGTCCTCTAATTCCA | Novel | NGA |
| CCTAACAAAACAAAGAGATG | Novel | NGG |
| CCTAATATACATTTACACCA | Novel | NGA |
| CCTACAGCCTCCTAGTACAA | Novel | NGA |
| CCTACGAACCACTGAACAAA | Novel | NGG |
| CCTAGAAAATTGAGAGAAGT | Novel | NNACCA |
| CCTATCCTATCAACACTTCC | Novel | NGA |
| CCTCAATGTTAGTATTCCTT | Novel | NGA |
| CCTCACAATACCGCAGAGTC | Novel | NAG |
| CCTCCAAGCTGTGCCTTGGG | Novel | NGG |
| CCTCCACCAATCGCCAGACA | M83 | NGA |
| CCTCCAGCTTATAGACCACC | Novel | NAA |
| CCTCCCAGTCTTTAAACAAA | Novel | NAG |
| CCTCCTAGTACAAAGACCTT | Novel | NAA |
| CCTCGAGAAGATTGACGATA | Novel | NGG |
| CCTCGCCTCGCAGACGAAGGT | Novel | NNNRRT |
| CCTCTATGTATCCCTCCTGT | Novel | NGC |
| CCTCTCACTCTGGGATCTTG | Novel | NAG |
| CCTCTGCCGATCCATACTGC | E8 | NGA |
| CCTCTGGGATTCTTTCCCGA | Novel | NNACCA |
| CCTGAACTGGAGCCACCAGC | Novel | NGG |
| CCTGAACTTTAGGCCCATAT | Novel | NAG |
| CCTGAGGATGAGTGTTTCTC | Novel | NAA |
| CCTGAGGGCTCCACCCCAAA | Novel | NGG |
| CCTGCATGACTACTGCTCAA | Novel | NGA |
| CCTGCCTCGTCGTCTAACAA | Novel | NAG |
| CCTGCCTCGTCGTCTAACAAC | Novel | NNNRRT |
| CCTGCGGACGACCCTTCTCG | Novel | NGG |
| CCTGCGTTAATGCCCTTGTA | Novel | NGC |
| CCTGCTGCGAGCAAAACAAG | Novel | NGG |
| CCTGCTGGTGGCTCCAGTTC | Novel | NGG |
| CCTGGAATTAGAGGACAAAC | Novel | NGG |
| CCTGGCCAGACGCCAACAAG | Novel | NNAGGA |
| CCTGGCCGTTGCCGGGCAAC | Novel | NGG |
| CCTGGGTGGGTGTTAATTTG | Novel | NAA |
| CCTGTCTGGCGATTGGTGGA | Novel | NGC |
| CCTGTCTTTAATCCTCATTG | Novel | NAA |
| CCTGTTAATAGGAAGTTTTC | Novel | NAA |
| CCTTATCGTCAATCTTCTCG | Novel | NGG |
| CCTTATTATCCAGAACATCTA | Novel | NNNRRT |
| CCTTCAGTACGAGATCTTCT | Novel | NGA |
| CCTTCCATAGAGTGTGTAAA | Novel | NAG |
| CCTTCCTGTCTGGCGATTGG | Novel | NGG |
| CCTTCGTCTGCGAGGCGAGG | Novel | NAG |
| CCTTGATAGTCCAGAAGAAC | Novel | NAA |
| CCTTGGACTCATAAGGTGGG | Novel | NAA |
| CCTTGGGTGGCTTTGGGGCA | Novel | NGG |
| CCTTGTTGGGATTGAAGTCC | Novel | NAA |
| CCTTTGGATAAAACCTAGCA | Novel | NGC |
| CCTTTTGGGGTGGAGCCCTC | Novel | NGG |
| CGAAGGTTTGGTACAGCAAC | Novel | NGG |
| CGAAGTGCACACGGTCCGGC | Novel | NGA |
| CGAATTTTGGCCAAGACACA | Novel | NGG |
| CGAATTTTGGCCAAGACACAC | Novel | NNNRRT |
| CGACCCCGAGAAGGGTCGTC | Novel | NGC |
| CGACCCTTATAAAGAATTTG | Novel | NAG |
| CGACCCTTCTCGGGGTCGCT | Novel | NGG |
| CGACCTTGAGGCATACTTCA | Novel | NAG |
| CGACGAGGCAGGTCCCCTAG | Novel | NAG |
| CGACGTGCAGAGGTGAAGCG | Novel | NAG |
| CGAGAAAGTGAAAGCCTGCT | Novel | NAG |
| CGAGAAGATTGACGATAAGG | Novel | NAG |
| CGAGCAAAACAAGCGGCTAG | Novel | NAG |
| CGAGGCAGGTCCCCTAGAAG | Novel | NAG |
| CGAGGGAGTTCTTCTTCTAG | Novel | NGG |
| CGATAACCAGGACAAGTTGG | M58 | NGG |
| CGATGTATATTTGCGGGAGA | Novel | NGA |
| CGATTGAGACCTTCGTCTGC | Novel | NAG |
| CGATTGGTGGAGGCAGGAGG | Novel | NGG |
| CGCAACCCCCACTGGCTGGGG | Novel | NNNRRT |
| CGCACGGAGGCCTTTTGGGG | Novel | NGG |
| CGCAGAAGATCTCAATCTCG | Novel | NGA |
| CGCAGACCAATTTATGCCTA | Novel | NAG |
| CGCAGAGTCTAGACTCGTGG | M35 | NGG |
| CGCAGGATAACCACATTGTG | Novel | NAA |
| CGCAGGATTCAGCGCCGACG | Novel | NGA |
| CGCAGGGTCCCCAATCCTCG | Novel | NGA |
| CGCAGGGTCCCCAATCCTCGA | Novel | NNNRRT |
| CGCAGTATGGATCGGCAGAG | Novel | NAG |
| CGCATGGAGACCACCGTGAA | Novel | NGC |
| CGCCAACAAGGTAGGAGCTG | Novel | NAG |
| CGCCCACCGAATGTTGCCCA | E95 | NGG |
| CGCCCCGTGGTCGGTCGGAA | Novel | NGG |
| CGCCGACGGGACGTAAACAA | Novel | NGG |
| CGCCGCGTCGCAGAAGATCT | Novel | NAA |
| CGCCTCAGCTCTGTATCGGG | Novel | NAG |
| CGCCTCCTGCCTCCACCAAT | Novel | NGC |
| CGCCTCGCAGACGAAGGTCT | Novel | NAA |
| CGCGCTGATGGCCCATGACC | Novel | NAG |
| CGCGTAAAGAGAGGTGCGCCC | Novel | NNNRRT |
| CGCGTGCGTGGAACCTTTTC | Novel | NGC |
| CGGAAAATTCCTATGGGAGT | Novel | NGG |
| CGGAAACTACTGTTGTTAGA | Novel | NGA |
| CGGAACGGCAGACGGAGAAG | Novel | NGG |
| CGGAAGTGTTGATAGGATAG | Novel | NGG |
| CGGACGACCCTTCTCGGGGT | Novel | NGC |
| CGGCAGACGGAGAAGGGGAC | Novel | NAG |
| CGGCGATTGAGACCTTCGTC | Novel | NGC |
| CGGCTAGGAGTTCCGCAGTA | Novel | NGG |
| CGGGAAGCCTTAGAGTCTCC | Novel | NGA |
| CGGGCAACGGGGTAAAGGTT | Novel | NAG |
| CGGGCTGAGGCCCACTCCCA | Novel | NAG |
| CGGGCTGAGGCCCACTCCCAT | Novel | NNGRRT |
| CGGGCTGAGGCCCACTCCCAT | Novel | NNNRRT |
| CGGGCTGGGTTTCACCCCAC | Novel | NGC |
| CGGGGAGTCCGCGTAAAGAG | Novel | NGG |
| CGGGGTTTTTCTTGTTGACA | Novel | NGA |
| CGGGTATATTATATAAGAGA | Novel | NAA |
| CGGTAAAAAGGGACTCAAGA | Novel | NGC |
| CGGTCGGAACGGCAGACGGA | Novel | NAA |
| CGGTGGGGTGAAACCCAGCC | Novel | NGA |
| CGGTTTCTCTTCCAAAAGTG | Novel | NGA |
| CGTAAACAAAGGACGTCCCG | Novel | NGC |
| CGTACTGAAGGAAAGAAGTC | Novel | NGA |
| CGTCAATCTTCTCGAGGATT | Novel | NGG |
| CGTCAGCAAACACTTGGCAC | Novel | NGA |
| CGTCCCGCGCAGGATCCAGT | Novel | NGG |
| CGTCCGAAGGTTTGGTACAG | Novel | NAA |
| CGTCGCATGGAGACCACCGT | Novel | NAA |
| CGTCTAACAACAGTAGTTTC | Novel | NGG |
| CGTCTAACAACAGTAGTTTCC | Novel | NNNRRT |
| CGTCTGGCCAGGTGTCCTTGT | Novel | NNGRRT |
| CGTCTGGCCAGGTGTCCTTGT | Novel | NNNRRT |
| CGTGAACGCCCACCGAATGT | Novel | NGC |
| CGTGCAGAGGTGAAGCGAAG | Novel | NGC |
| CGTGCGGTGGGGTGAAACCC | Novel | NGC |
| CGTGCTGGTGGTTGAGGATCC | Novel | NNGRRT |
| CGTGCTGGTGGTTGAGGATCC | Novel | NNNRRT |
| CGTGTGTCTTGGCCAAAATT | Novel | NGC |
| CGTTCACGGTGGTCTCCATG | Novel | NGA |
| CGTTCCGACCGACCACGGGG | Novel | NGC |
| CGTTGACATTGCAGAGAGTC | Novel | NAA |
| CGTTGACATTGCAGAGAGTCC | Novel | NNGRRT |
| CGTTGACATTGCAGAGAGTCC | Novel | NNNRRT |
| CGTTGCCGGGCAACGGGGTA | Novel | NAG |
| CTAACAACAGTAGTTTCCGG | Novel | NAG |
| CTAATATGGGCCTAAAGTTC | Novel | NGG |
| CTAATGACTCTAGCTACCTGG | Novel | NNGRRT |
| CTAATGACTCTAGCTACCTGG | Novel | NNNRRT |
| CTACCTTGTTGGCGTCTGGC | Novel | NAG |
| CTACGAACCACTGAACAAAT | Novel | NGC |
| CTACTAGGTCTCTAGATGCT | Novel | NGA |
| CTACTGTTGTTAGACGACGA | Novel | NGC |
| CTACTGTTGTTAGACGACGAG | Novel | NNNRRT |
| CTAGAAGATCTCGTACTGAA | Novel | NGA |
| CTAGACTCGTGGTGGACTTCT | E9 | NNNRRT |
| CTAGACTCTGCGGTATTGTG | Novel | NGG |
| CTAGAGTCATTAGTTCCCCC | Novel | NAG |
| CTAGCAGGCATAATCAATTG | Novel | NAA |
| CTAGCCGCTTGTTTTGCTCG | Novel | NAG |
| CTAGCTACCTGGGTGGGTGT | Novel | NAA |
| CTAGGTTTTATCCAAAGGTTA | Novel | NNNRRT |
| CTAGTAAACTGAGCCAGGAG | Novel | NAA |
| CTAGTAGTCAGTTATGTCAAC | Novel | NNNRRT |
| CTATAACGGTTTCTCTTCCA | Novel | NAA |
| CTATCCTATCAACACTTCCG | Novel | NAA |
| CTATGTGTTGTTTCTCTCTTA | Novel | NNNRRT |
| CTATTAACAGGCCTATTGAT | Novel | NGG |
| CTATTGATTGGAAAGTATGT | Novel | NAA |
| CTATTTACACACTCTATGGA | Novel | NGG |
| CTCAAGATGCTGTACAGACT | Novel | NGG |
| CTCAATCGCCGCGTCGCAGA | M77 | NGA |
| CTCAATCTCGGGAACCTCAAT | Novel | NNNRRT |
| CTCACAATACCGCAGAGTCT | Novel | NGA |
| CTCACCAACCTCCTGTCCTC | Novel | NAA |
| CTCACCATACTGCACTCAGG | Novel | NAA |
| CTCAGGCTCAGGGCATACTA | Novel | NAA |
| CTCATCCTCAGGCCATGCAG | Novel | NGG |
| CTCCAACTTGTCCTGGTTAT | Novel | NGC |
| CTCCAAGCTGTGCCTTGGGT | Novel | NGC |
| CTCCACCAATCGCCAGACAG | Novel | NAA |
| CTCCACCCCAAAAGGCCTCCG | Novel | NNNRRT |
| CTCCAGACCTGCTGCGAGCA | Novel | NAA |
| CTCCATGCGACGTGCAGAGG | M92 | NGA |
| CTCCATGTTCAGCGCAGGGTC | Novel | NNNRRT |
| CTCCCATAGGAATTTTCCGA | Novel | NAG |
| CTCCCTCGCCTCGCAGACGA | Novel | NGG |
| CTCCTACCTTGTTGGCGTCT | Novel | NGC |
| CTCCTGCCTCCACCAATCGC | Novel | NAG |
| CTCCTGGCTCAGTTTACTAG | Novel | NGC |
| CTCGAGAAGATTGACGATAA | Novel | NGG |
| CTCGAGGATTGGGGACCCTG | Novel | NGC |
| CTCTAAGGCTTCCCGATACA | Novel | NAG |
| CTCTAGATGCTGGATCTTCC | Novel | NAA |
| CTCTATAACGGTTTCTCTTC | Novel | NAA |
| CTCTATAACGGTTTCTCTTCC | Novel | NNNRRT |
| CTCTCACTCTGGGATCTTGC | Novel | NGA |
| CTCTCGTCCCCTTCTCCGTC | Novel | NGC |
| CTCTCTGCAATGTCAACGAC | Novel | NGA |
| CTCTGAAGGCTGGATCCAAC | Novel | NGG |
| CTCTGAAGGCTGGATCCAACT | Novel | NNNRRT |
| CTCTGCAAGATCCCAGAGTG | Novel | NGA |
| CTCTGCCGATCCATACTGCG | Novel | NAA |
| CTCTGGGATCTTGCAGAGTT | Novel | NGG |
| CTCTGGGATTCTTTCCCGACC | Novel | NNNRRT |
| CTCTGTATCGGGAAGCCTTA | Novel | NAG |
| CTCTTATGTAAGACCTTGGG | Novel | NAA |
| CTCTTCCAAAAGTGAGACAA | Novel | NAA |
| CTCTTTGTTTTGTTAGGGTT | Novel | NAA |
| CTGAAAGCCAAACAGTGGGG | Novel | NAA |
| CTGAACTGGAGCCACCAGCA | Novel | NGG |
| CTGAACTGGAGCCACCAGCAG | Novel | NNNRRT |
| CTGAAGGAAAGAAGTCAGAA | Novel | NGC |
| CTGACGCAACCCCCACTGGC | Novel | NGG |
| CTGACTACTAGGTCTCTAGA | Novel | NGC |
| CTGACTTCTTTCCTTCAGTA | Novel | NGA |
| CTGAGCCAGGAGAAACGGGC | M70 | NGA |
| CTGAGGATGAGTGTTTCTCA | Novel | NAG |
| CTGAGGGCTCCACCCCAAAA | Novel | NGC |
| CTGAGTGCAGTATGGTGAGG | Novel | NGA |
| CTGCAAGATCCCAGAGTGAG | Novel | NGG |
| CTGCATGACTACTGCTCAAG | Novel | NAA |
| CTGCCAACTGGATCCTGCGC | M191 | NGG |
| CTGCCGGACCGTGTGCACTT | Novel | NGC |
| CTGCCGTTCCGACCGACCAC | Novel | NGG |
| CTGCCTCCACCAATCGCCAG | Novel | NNAGGA |
| CTGCCTTCCTGTCTGGCGAT | Novel | NGG |
| CTGCGAATTTTGGCCAAGACA | Novel | NNNRRT |
| CTGCGAGCAAAACAAGCGGC | Novel | NAG |
| CTGCGAGCAAAACAAGCGGCT | Novel | NNGRRT |
| CTGCGAGCAAAACAAGCGGCT | Novel | NNNRRT |
| CTGCTGCGAGCAAAACAAGC | Novel | NGC |
| CTGCTGGTGGCTCCAGTTCA | Novel | NGA |
| CTGGAATTAGAGGACAAACG | Novel | NGC |
| CTGGATCCAACTGGTGGTCG | Novel | NGA |
| CTGGCCAGACGCCAACAAGG | Novel | NAG |
| CTGGCCAGGTGTCCTTGTTG | Novel | NGA |
| CTGGCCGTTGCCGGGCAACG | Novel | NGG |
| CTGGCGATTGGTGGAGGCAG | Novel | NAG |
| CTGGCTGGGGCTTGGTCATG | Novel | NGC |
| CTGGGAGGAGTTGGGGGAGG | Novel | NGA |
| CTGGGGGGAACTAATGACTC | Novel | NAG |
| CTGGGTGGGTGTTAATTTGG | Novel | NAG |
| CTGGGTTTCACCCCACCGCA | Novel | NGG |
| CTGGTGCGCAGACCAATTTA | Novel | NGC |
| CTGTAACACGAGAAGGGGTC | Novel | NNAGGA |
| CTGTACAGACTTGGCCCCCA | Novel | NNACCA |
| CTGTACCAAACCTTCGGACG | Novel | NAA |
| CTGTATTTCCCTGCTGGTGGC | Novel | NNNRRT |
| CTGTCTGGCGATTGGTGGAG | Novel | NNAGGA |
| CTGTCTTTAATCCTCATTGG | Novel | NAA |
| CTGTGCCAAGTGTTTGCTGA | Novel | NGC |
| CTGTGCCTTGGGTGGCTTTG | Novel | NGG |
| CTGTGCTGCCAACTGGATCC | Novel | NGC |
| CTGTGTTTGCTCTGAAGGCT | Novel | NGA |
| CTGTTAATAGGAAGTTTTCT | Novel | NAA |
| CTGTTCAAGCCTCCAAGCTG | Novel | NGC |
| CTGTTGCTGTACCAAACCTT | Novel | NGG |
| CTGTTGTTAGACGACGAGGC | Novel | NGG |
| CTGTTTGGCTTTCAGTTATA | Novel | NGG |
| CTGTTTGTTTAAAGACTGGG | Novel | NGG |
| CTTACAAGGCCTTTCTGTGT | Novel | NAA |
| CTTACAAGGCCTTTCTGTGTA | Novel | NNNRRT |
| CTTACAGTTAATGAGAAAAG | Novel | NAG |
| CTTATCCAATGGTAAATATT | Novel | NGG |
| CTTATCGTCAATCTTCTCGA | Novel | NGA |
| CTTATGAGTCCAAGGAATAC | Novel | NAA |
| CTTCAAAGACTGTTTGTTTA | Novel | NAG |
| CTTCACCTCTGCACGTCGCA | Novel | NGG |
| CTTCCAAATTAACACCCACC | Novel | NAG |
| CTTCCAATGACATAACCCAT | Novel | NAA |
| CTTCCGGAAACTACTGTTGT | Novel | NAG |
| CTTCCTATTAACAGGCCTAT | Novel | NGA |
| CTTCCTGTCTGGCGATTGGT | Novel | NGA |
| CTTCTCTCAATTTTCTAGGG | M87 | NGA |
| CTTCTGCGACGCGGCGATTG | Novel | NGA |
| CTTCTTTTCTCATTAACTGT | Novel | NAG |
| CTTGAACAGTAGGACATGAA | Novel | NAA |
| CTTGCCTGAGTGCAGTATGG | Novel | NGA |
| CTTGGCACAGACCTGGCCGT | Novel | NGC |
| CTTGGGTGGCTTTGGGGCAT | Novel | NGA |
| CTTGGTGTAAATGTATATTA | Novel | NGA |
| CTTGTAAGTTGGCGAGAAAG | Novel | NGA |
| CTTGTCAACAAGAAAAACCC | Novel | NGC |
| CTTGTCTCACTTTTGGAAGA | Novel | NAA |
| CTTGTTCATGTCCTACTGTT | Novel | NAA |
| CTTGTTGACAAGAATCCTCA | Novel | NAA |
| CTTTAAACAAACAGTCTTTG | Novel | NAG |
| CTTTAGGCCCATATTAGTGT | Novel | NGA |
| CTTTCCACCAGCAATCCTCT | Novel | NGG |
| CTTTCGGAAAATTCCTATGG | Novel | NAG |
| CTTTCTGTGTAAACAATACC | Novel | NGA |
| CTTTGAGAAACACTCATCCT | Novel | NAG |
| CTTTGGATAAAACCTAGCAGG | Novel | NNNRRT |
| CTTTGTACTAGGAGGCTGTA | Novel | NGC |
| CTTTGTTTACGTCCCGTCGG | Novel | NGC |
| CTTTTCTCATTAACTGTAAG | Novel | NGG |
| CTTTTGGAAGAGAAACCGTTA | Novel | NNGRRT |
| CTTTTGGAAGAGAAACCGTTA | Novel | NNNRRT |
| CTTTTGGGGTGGAGCCCTCA | Novel | NGC |
| GAAAAACCCCGCCTGTAACA | Novel | NGA |
| GAAAAGATGGTGTTTTCCAA | Novel | NGA |
| GAAAAGATGGTGTTTTCCAA | Novel | NNAGGA |
| GAAAAGATGGTGTTTTCCAAT | Novel | NNGRRT |
| GAAAAGATGGTGTTTTCCAAT | Novel | NNNRRT |
| GAAAATTGAGAGAAGTCCACC | Novel | NNGRRT |
| GAAAATTGAGAGAAGTCCACC | Novel | NNNRRT |
| GAAAATTGGTAACAGCGGTA | Novel | NAA |
| GAAACACTCATCCTCAGGCCA | Novel | NNNRRT |
| GAAACCCAGCCCGAATGCTC | Novel | NAG |
| GAAAGACACCAAATACTCTA | Novel | NAA |
| GAAAGACACCAAATACTCTAT | Novel | NNNRRT |
| GAAAGCCAAACAGTGGGGGA | Novel | NAG |
| GAAAGCCCAGGATGATGGGA | M37 | NGG |
| GAAAGCCCAGGATGATGGGAT | M4 | NNGRRT |
| GAAAGCCCAGGATGATGGGAT | Novel | NNNRRT |
| GAAAGCCCTACGAACCACTGA | Novel | NNNRRT |
| GAAAGGCCTTGTAAGTTGGC | Novel | NAG |
| GAAAGTATGTCAACGAATTG | Novel | NGG |
| GAAAGTGAAAGCCTGCTTAGA | Novel | NNGRRT |
| GAAAGTGAAAGCCTGCTTAGA | Novel | NNNRRT |
| GAAATACAGGCCTCTCACTC | Novel | NGG |
| GAACAAGAGATGATTAGGCA | Novel | NAG |
| GAACAAGATCTACAGCATGG | Novel | NGC |
| GAACAATGCTCAGGAGACTC | Novel | NAA |
| GAACACATCATACAAAAAAT | Novel | NAA |
| GAACAGGGTTTACTGCTCCT | Novel | NAA |
| GAACAGTAGGACATGAACAA | Novel | NAG |
| GAACATCACATCAGGATTCC | Novel | NAG |
| GAACATGGAGAACATCACAT | Novel | NAG |
| GAACCTGCATGACTACTGCT | Novel | NAA |
| GAACCTGCATGACTACTGCT | Novel | NNAGGA |
| GAACCTTTACCCCGTTGCCC | Novel | NGC |
| GAACGCCCACCGAATGTTGCC | Novel | NNNRRT |
| GAACTACCGTGTGTCTTGGC | Novel | NAA |
| GAACTCCCTCGCCTCGCAGA | Novel | NGA |
| GAACTCCCTCGCCTCGCAGAC | E10 | NNNRRT |
| GAACTCCTAGCCGCTTGTTT | Novel | NGC |
| GAACTGGAGCCACCAGCAGG | Novel | NAA |
| GAAGAACCAACAAGAAGATG | Novel | NGG |
| GAAGAACTCCCTCGCCTCGC | E11 | NGA |
| GAAGAAGAACTCCCTCGCCT | Novel | NGC |
| GAAGATCTCAATCTCGGGAAC | M14 | NNNRRT |
| GAAGATCTCGTACTGAAGGA | Novel | NAG |
| GAAGATCTCGTACTGAAGGAA | Novel | NNNRRT |
| GAAGATGAGGCATAGCAGCA | Novel | NGA |
| GAAGATTGACGATAAGGGAG | Novel | NGG |
| GAAGATTGACGATAAGGGAGA | Novel | NNNRRT |
| GAAGCGAAGTGCACACGGTC | Novel | NGG |
| GAAGGAAAGAAGTCAGAAGG | Novel | NAA |
| GAAGGCACAGACGGGGAGTC | Novel | NGC |
| GAAGGCGGGTATATTATATA | Novel | NGA |
| GAAGGGGACGAGAGAGTCCC | Novel | NAG |
| GAAGGGTCGTCCGCAGGATT | Novel | NAG |
| GAAGGTCTCAATCGCCGCGT | Novel | NGC |
| GAAGGTTTGGTACAGCAACA | Novel | NGA |
| GAAGTCAGAAGGCAAAAACG | Novel | NGA |
| GAAGTTATGGGTCCTTGCCA | Novel | NAA |
| GAATACTAACATTGAGGTTCC | Novel | NNNRRT |
| GAATATGGTGACCCACAAAA | Novel | NGA |
| GAATCCACACTCCGAAAGACA | M12 | NNNRRT |
| GAATCCCAGAGGATTGCTGG | Novel | NGG |
| GAATTGCTTGCCTGAGTGCAG | Novel | NNNRRT |
| GACAAAAGAAAATTGGTAAC | Novel | NGC |
| GACAAACGGGCAACATACCT | Novel | NGA |
| GACAAACGGGCAACATACCTT | Novel | NNNRRT |
| GACAACAGAGTTATCAGTCC | Novel | NGA |
| GACAACAGAGTTATCAGTCCC | Novel | NNNRRT |
| GACAAGAAATGTGAAACCAC | Novel | NAG |
| GACAAGAATCCTCACAATAC | Novel | NGC |
| GACACACGGTAGTTCCCCCT | Novel | NGA |
| GACACACGGTAGTTCCCCCTA | Novel | NNNRRT |
| GACACATCCAGCGATAACCA | M67 | NGA |
| GACACCTGGCCAGACGCCAA | Novel | NAA |
| GACACTATTTACACACTCTA | Novel | NGG |
| GACAGGAAGGCAGCCTACCC | Novel | NGC |
| GACAGGTACAGTAGAAGAAT | Novel | NAA |
| GACATAACCCATAAAATTCA | Novel | NAG |
| GACATACTTTCCAATCAATA | Novel | NGC |
| GACATGAACAAGAGATGATT | Novel | NGG |
| GACCAAGCCCCAGCCAGTGG | Novel | NGG |
| GACCACCGTGAACGCCCACC | Novel | NAA |
| GACCCCGAGAAGGGTCGTCC | Novel | NNAGGA |
| GACCCCGAGAAGGGTCGTCCG | Novel | NNGRRT |
| GACCCCGAGAAGGGTCGTCCG | Novel | NNNRRT |
| GACCCCTTCTCGTGTTACAGG | Novel | NNGRRT |
| GACCCCTTCTCGTGTTACAGG | Novel | NNNRRT |
| GACCCTGCGCTGAACATGGA | Novel | NAA |
| GACCCTTATAAAGAATTTGG | Novel | NGC |
| GACCCTTCTCGGGGTCGCTT | Novel | NGG |
| GACCTAGTAGTCAGTTATGT | Novel | NAA |
| GACCTGCTGCGAGCAAAACA | Novel | NGC |
| GACCTGGCCGTTGCCGGGCAA | Novel | NNGRRT |
| GACCTGGCCGTTGCCGGGCAA | Novel | NNNRRT |
| GACCTTCGTCTGCGAGGCGA | Novel | NGG |
| GACCTTGAGGCATACTTCAA | Novel | NGA |
| GACCTTGGGCAACATTCGGT | Novel | NGG |
| GACGACGAGGCAGGTCCCCT | M74 | NGA |
| GACGAGGCAGGTCCCCTAGA | M75 | NGA |
| GACGCAACCCCCACTGGCTG | Novel | NGG |
| GACGCCAACAAGGTAGGAGC | M53 | NGG |
| GACGGGGAGTCCGCGTAAAG | Novel | NGA |
| GACGTAAACAAAGGACGTCC | Novel | NGC |
| GACTACTGCCTCTCCCTTATC | Novel | NNNRRT |
| GACTCGTGGTGGACTTCTCT | Novel | NAA |
| GACTCTAAGGCTTCCCGATA | Novel | NAG |
| GACTGGGAGGAGTTGGGGGA | Novel | NGA |
| GACTGTTTGTTTAAAGACTG | Novel | NGA |
| GACTGTTTGTTTAAAGACTG | Novel | NNAGGA |
| GACTTCTCTCAATTTTCTAG | E12 | NGG |
| GACTTCTTTCCTTCAGTACG | Novel | NGA |
| GAGAAAGTGAAAGCCTGCTT | Novel | NGA |
| GAGAAGATTGACGATAAGGG | Novel | NGA |
| GAGAAGTCCACCACGAGTCT | M66 | NGA |
| GAGACCTTCGTCTGCGAGGC | Novel | NAG |
| GAGAGAGTCCCAAGCGACCC | Novel | NGA |
| GAGAGGCAGTAGTCGGAACA | Novel | NGG |
| GAGAGTAACTCCACAGTAGCT | Novel | NNNRRT |
| GAGAGTCCCAAGCGACCCCG | Novel | NGA |
| GAGATGATTAGGCAGAGGTG | Novel | NAA |
| GAGATGATTAGGCAGAGGTGA | Novel | NNNRRT |
| GAGATTGAGATCTTCTGCGA | Novel | NGC |
| GAGCAGTAGTCATGCAGGTT | Novel | NGG |
| GAGCCACCAGCAGGGAAATA | Novel | NAG |
| GAGCCAGGAGAAACGGGCTG | Novel | NGG |
| GAGCCTGAGGGCTCCACCCC | Novel | NAA |
| GAGCTGAGGCGGTATCTAGA | Novel | NGA |
| GAGGACAAACGGGCAACATAC | Novel | NNNRRT |
| GAGGACAACAGAGTTATCAGT | Novel | NNNRRT |
| GAGGACAGGAGGTTGGTGAG | Novel | NGA |
| GAGGACTCTTGGACTCTCTG | Novel | NAA |
| GAGGAGCCGAAAAGGTTCCA | Novel | NGC |
| GAGGAGTTGGGGGAGGAGAT | Novel | NAG |
| GAGGATTCTTGTCAACAAGA | Novel | NAA |
| GAGGATTGGGGACCCTGCGC | Novel | NGA |
| GAGGCAGGAGGCGGATTTGC | Novel | NGG |
| GAGGCAGGTCCCCTAGAAGA | Novel | NGA |
| GAGGCATAGCAGCAGGATGA | Novel | NGA |
| GAGGCATAGCAGCAGGATGA | Novel | NNAGGA |
| GAGGCTTGAACAGTAGGACA | Novel | NGA |
| GAGGGAGTTCTTCTTCTAGG | Novel | NGA |
| GAGGTGAAAAAGTTGCATGG | Novel | NGC |
| GAGGTGAAAAAGTTGCATGGT | Novel | NNNRRT |
| GAGGTGAAGCGAAGTGCACA | Novel | NGG |
| GAGTAACTCCACAGTAGCTC | Novel | NAA |
| GAGTCATTAGTTCCCCCCAG | Novel | NAA |
| GAGTCCAAGGAATACTAACAT | Novel | NNNRRT |
| GAGTCCCAAGCGACCCCGAG | Novel | NAG |
| GAGTCCCTTTTTACCGCTGTT | Novel | NNNRRT |
| GAGTGCGAATCCACACTCCG | Novel | NAA |
| GAGTTTGGTGAAAGGTTGTG | Novel | NAA |
| GATAACCACATTGTGTAAAT | Novel | NGG |
| GATAACCAGGACAAGTTGGA | M89 | NGA |
| GATAAGGGAGAGGCAGTAGT | Novel | NGG |
| GATAATGTTTGCTCCAGACC | Novel | NGC |
| GATACGATGTATATTTGCGG | Novel | NAG |
| GATAGGATAGGGGCATTTGG | Novel | NGG |
| GATAGTCCAGAAGAACCAAC | Novel | NAG |
| GATCCAACTGGTGGTCGGGA | Novel | NAG |
| GATCCATACTGCGGAACTCC | Novel | NAG |
| GATCCTCAACCACCAGCACG | Novel | NGA |
| GATCCTCAACCACCAGCACG | Novel | NNACCA |
| GATCGGCAGAGGAGCCGAAA | Novel | NGG |
| GATCTCAATCTCGGGAACCT | Novel | NAA |
| GATCTCGTACTGAAGGAAAG | Novel | NAG |
| GATCTTCTAGATACCGCCTC | Novel | NGC |
| GATCTTGCAGAGTTTGGTGA | Novel | NAG |
| GATGAGAAGGCACAGACGGG | Novel | NAG |
| GATGAGGCATAGCAGCAGGA | Novel | NGA |
| GATGAGTGTTTCTCAAAGGT | Novel | NGA |
| GATGATGTGGTATTGGGGGC | Novel | NAA |
| GATGATTAGGCAGAGGTGAA | Novel | NAA |
| GATGGCCCATGACCAAGCCC | Novel | NAG |
| GATGTGATGTTCTCCATGTT | Novel | NAG |
| GATGTTCTCCATGTTCAGCG | Novel | NAG |
| GATTAAAGACAGGTACAGTA | Novel | NAA |
| GATTAAAGACAGGTACAGTAG | Novel | NNGRRT |
| GATTAAAGACAGGTACAGTAG | Novel | NNNRRT |
| GATTAAAGGTCTTTGTACTA | Novel | NGA |
| GATTAACTAGATGTTCTGGA | Novel | NAA |
| GATTCAGCGCCGACGGGACG | Novel | NAA |
| GATTGAATACATGCATACAA | Novel | NGG |
| GATTGACGATAAGGGAGAGG | Novel | NAG |
| GATTGACGATAAGGGAGAGGC | Novel | NNNRRT |
| GATTGAGACCTTCGTCTGCG | Novel | NGG |
| GATTGAGATCTTCTGCGACG | Novel | NGG |
| GATTGAGATCTTCTGCGACGC | Novel | NNNRRT |
| GATTGCAATTGATTATGCCTG | M18 | NNNRRT |
| GATTGCTGGTGGAAAGATTC | Novel | NGC |
| GATTGGAGGTTGGGGACTGC | Novel | NAA |
| GATTGGGACTTCAATCCCAA | Novel | NAA |
| GATTGGGACTTCAATCCCAA | Novel | NNAGGA |
| GATTGGTGGAGGCAGGAGGC | Novel | NGA |
| GATTTGCTGTGTTTGCTCTG | Novel | NAG |
| GCAAACACTTGGCACAGACC | Novel | NGG |
| GCAAACATTATCGGGACTGA | Novel | NAA |
| GCAAAGAATTGCTTGCCTGAG | Novel | NNNRRT |
| GCAAAGTTTGTAGTATGCCC | Novel | NGA |
| GCAAATATACATCGTATCCA | Novel | NGG |
| GCAAATCCAGATTGGGACTT | Novel | NAA |
| GCAAATCCGCCTCCTGCCTCC | Novel | NNNRRT |
| GCAACAGGAGGGATACATAG | Novel | NGG |
| GCAACATACCTTGATAGTCC | Novel | NGA |
| GCAACGGCCAGGTCTGTGCC | Novel | NAG |
| GCAACTTTTTCACCTCTGCC | Novel | NAA |
| GCAAGCAATTCTTTGCTGGG | M45 | NGG |
| GCAATGTCAACGACCGACCT | Novel | NGA |
| GCAATTTCCGTCCGAAGGTT | Novel | NGG |
| GCACACGGTCCGGCAGATGA | Novel | NAA |
| GCACAGACCTGGCCGTTGCC | Novel | NGG |
| GCACAGACGGGGAGTCCGCG | Novel | NAA |
| GCACAGCCTAGCAGCCATGGA | Novel | NNNRRT |
| GCACAGCTTGGAGGCTTGAA | Novel | NAG |
| GCACGGAGGCCTTTTGGGGT | Novel | NGA |
| GCACGGGACCATGCCGAACC | Novel | NGC |
| GCACTAGTAAACTGAGCCAG | Novel | NAG |
| GCACTCCTCCAGCTTATAGA | Novel | NNACCA |
| GCAGAAGATCTCAATCTCGG | Novel | NAA |
| GCAGACACATCCAGCGATAA | Novel | NNAGGA |
| GCAGACCAATTTATGCCTAC | Novel | NGC |
| GCAGACGGAGAAGGGGACGA | Novel | NAG |
| GCAGAGGTGAAAAAGTTGCA | Novel | NGG |
| GCAGAGGTGAAGCGAAGTGCA | Novel | NNNRRT |
| GCAGAGTCTAGACTCGTGGT | M65 | NGA |
| GCAGATGAGAAGGCACAGAC | Novel | NGG |
| GCAGATGAGAAGGCACAGACG | Novel | NNGRRT |
| GCAGATGAGAAGGCACAGACG | Novel | NNNRRT |
| GCAGCACAGCCTAGCAGCCA | Novel | NGG |
| GCAGGAGGCGGATTTGCTGG | Novel | NAA |
| GCAGGATAACCACATTGTGT | Novel | NAA |
| GCAGGATCCAGTTGGCAGCA | Novel | NAG |
| GCAGGCTTTCACTTTCTCGC | Novel | NAA |
| GCAGGGTCCCCAATCCTCGA | Novel | NAA |
| GCAGGTTCGGCATGGTCCCG | Novel | NGC |
| GCAGGTTCGGCATGGTCCCGT | Novel | NNNRRT |
| GCAGTAGTCATGCAGGTTCGG | Novel | NNNRRT |
| GCAGTATGGATCGGCAGAGG | Novel | NGC |
| GCATAAATTGGTCTGCGCAC | Novel | NAG |
| GCATACAAGGGCATTAACGC | Novel | NGG |
| GCATAGCAGCAGGATGAAGA | Novel | NGA |
| GCATAGCAGCAGGATGAAGAG | Novel | NNNRRT |
| GCATCTAGAGACCTAGTAGT | Novel | NAG |
| GCATGGACATCGACCCTTAT | Novel | NAA |
| GCATGGACATCGACCCTTATA | Novel | NNGRRT |
| GCATGGACATCGACCCTTATA | Novel | NNNRRT |
| GCATGTATTCAATCTAAGCA | Novel | NGC |
| GCATTTGGTGGTCTATAAGC | Novel | NGG |
| GCCAACAAGGTAGGAGCTGG | Novel | NGC |
| GCCAAGTCTGTACAGCATCT | Novel | NGA |
| GCCACAAGAACACATCATAC | Novel | NAA |
| GCCACAAGAACACATCATACA | M28 | NNNRRT |
| GCCACCAGCAGGGAAATACA | Novel | NGC |
| GCCACCCAAGGCACAGCTTG | Novel | NAG |
| GCCAGACGCCAACAAGGTAG | Novel | NAG |
| GCCAGGTGTCCTTGTTGGGAT | Novel | NNNRRT |
| GCCAGTGGGGGTTGCGTCAG | Novel | NAA |
| GCCATTTGTTCAGTGGTTCG | Novel | NAG |
| GCCCAAGGTCTTACATAAGA | Novel | NGA |
| GCCCACTTACAGTTAATGAG | Novel | NAA |
| GCCCATGACCAAGCCCCAGC | Novel | NAG |
| GCCCCGTGGTCGGTCGGAAC | Novel | NGC |
| GCCCGTTTGTCCTCTAATTC | Novel | NAG |
| GCCGACGGGACGTAAACAAA | Novel | NGA |
| GCCGCAGACACATCCAGCGA | Novel | NAA |
| GCCGCAGACACATCCAGCGA | Novel | NNACCA |
| GCCGCTTGTTTTGCTCGCAG | Novel | NAG |
| GCCGGGCAACGGGGTAAAGGT | Novel | NNNRRT |
| GCCGTTCCGACCGACCACGG | Novel | NGC |
| GCCGTTGCCGGGCAACGGGG | Novel | NAA |
| GCCGTTGCCGGGCAACGGGGT | Novel | NNNRRT |
| GCCTAAAGTTCAGGCAACTCT | Novel | NNNRRT |
| GCCTACAAACTGTTCACATTT | Novel | NNNRRT |
| GCCTACAGCCTCCTAGTACA | Novel | NAG |
| GCCTCAGCCCGTTTCTCCTGG | Novel | NNNRRT |
| GCCTCAGCTCTGTATCGGGA | Novel | NGC |
| GCCTCCACCAATCGCCAGAC | Novel | NGG |
| GCCTCGTCGTCTAACAACAG | Novel | NAG |
| GCCTCTCACTCTGGGATCTTG | Novel | NNGRRT |
| GCCTCTCACTCTGGGATCTTG | Novel | NNNRRT |
| GCCTGAGGATGAGTGTTTCT | Novel | NAA |
| GCCTGAGGATGAGTGTTTCTC | Novel | NNNRRT |
| GCCTGAGGGCTCCACCCCAA | Novel | NAG |
| GCCTGCTAGGTTTTATCCAA | Novel | NGG |
| GCCTGCTTAGATTGAATACA | Novel | NGC |
| GCCTGTATTTCCCTGCTGGT | Novel | NGC |
| GCCTTCAGAGCAAACACAGC | Novel | NAA |
| GCCTTCTGACTTCTTTCCTT | Novel | NAG |
| GCCTTTTGGGGTGGAGCCCT | Novel | NAG |
| GCGAAGTGCACACGGTCCGG | Novel | NAG |
| GCGAATCCACACTCCGAAAG | Novel | NNACCA |
| GCGACGTGCAGAGGTGAAGC | Novel | NAA |
| GCGAGCAAAACAAGCGGCTA | Novel | NGA |
| GCGAGGGAGTTCTTCTTCTA | Novel | NGG |
| GCGATAACCAGGACAAGTTG | Novel | NAG |
| GCGATTGAGACCTTCGTCTG | Novel | NGA |
| GCGCAGGGTCCCCAATCCTC | Novel | NAG |
| GCGCCGACGGGACGTAAACA | Novel | NAG |
| GCGCGTGCGTGGAACCTTTT | Novel | NGG |
| GCGCTGATGGCCCATGACCA | Novel | NGC |
| GCGGGAGAGGACAACAGAGTT | Novel | NNNRRT |
| GCGGGGTTTTTCTTGTTGAC | Novel | NAG |
| GCGGGTATATTATATAAGAG | Novel | NGA |
| GCGTCAGCAAACACTTGGCA | Novel | NAG |
| GCTAGGCTGTGCTGCCAACT | Novel | NGA |
| GCTATGCCTCATCTTCTTGT | Novel | NGG |
| GCTCAGGAGACTCTAAGGCTT | Novel | NNNRRT |
| GCTCCAGACCTGCTGCGAGC | Novel | NAA |
| GCTCCAGCTCCTACCTTGTT | Novel | NGC |
| GCTCCTACCTTGTTGGCGTC | Novel | NGG |
| GCTCCTCTGCCGATCCATAC | Novel | NGC |
| GCTCCTGAACTGGAGCCACC | Novel | NGC |
| GCTCGCAGCAGGTCTGGAGC | Novel | NAA |
| GCTCTGTATCGGGAAGCCTT | Novel | NGA |
| GCTGAGGCCCACTCCCATAG | Novel | NAA |
| GCTGCCAACTGGATCCTGCG | M190 | NGG |
| GCTGCCCCATTTACACAATG | Novel | NGG |
| GCTGCGAGCAAAACAAGCGG | Novel | NNAGGA |
| GCTGCTAGGCTGTGCTGCCAA | Novel | NNGRRT |
| GCTGCTAGGCTGTGCTGCCAA | Novel | NNNRRT |
| GCTGCTATGCCTCATCTTCTT | E14 | NNNRRT |
| GCTGGATCCAACTGGTGGTC | Novel | NGG |
| GCTGGTGGCTCCAGTTCAGG | Novel | NGC |
| GCTGGTGGTTGAGGATCCTG | Novel | NAA |
| GCTGTACCAAACCTTCGGAC | M91 | NGA |
| GCTGTAGATCTTGTTCCCAA | Novel | NAA |
| GCTGTAGGCATAAATTGGTC | Novel | NGC |
| GCTGTGCCTTGGGTGGCTTT | Novel | NGG |
| GCTGTGTTTGCTCTGAAGGC | Novel | NGG |
| GCTTCCCGATACAGAGCTGA | Novel | NGC |
| GCTTGCCTGAGTGCAGTATGG | Novel | NNNRRT |
| GCTTGGAGGCTTGAACAGTA | Novel | NGA |
| GCTTGGTCATGGGCCATCAG | Novel | NGC |
| GCTTTCCCCCACTGTTTGGCT | Novel | NNNRRT |
| GCTTTCGGAAAATTCCTATG | Novel | NGA |
| GGAAAATTCCTATGGGAGTG | Novel | NGC |
| GGAAAGAAGTCAGAAGGCAA | Novel | NAA |
| GGAAAGATTCTGCCCCATGCT | Novel | NNNRRT |
| GGAAAGCCCTACGAACCACT | Novel | NAA |
| GGAAATACAGGCCTCTCACTC | Novel | NNGRRT |
| GGAAATACAGGCCTCTCACTC | Novel | NNNRRT |
| GGAACAAGATCTACAGCATG | M51 | NGG |
| GGAACAGGGTTTACTGCTCC | Novel | NGA |
| GGAACGGCAGACGGAGAAGG | Novel | NGA |
| GGAACTAATGACTCTAGCTAC | Novel | NNGRRT |
| GGAACTAATGACTCTAGCTAC | Novel | NNNRRT |
| GGAACTACCGTGTGTCTTGGC | Novel | NNNRRT |
| GGAAGATCCAGCATCTAGAGA | Novel | NNNRRT |
| GGAAGATGATAAAACGCCGC | Novel | NGA |
| GGAAGCCTTAGAGTCTCCTG | Novel | NGC |
| GGAAGGCGGGTATATTATAT | Novel | NAG |
| GGAAGTGTTGATAGGATAGG | Novel | NGC |
| GGAATTAGAGGACAAACGGG | Novel | NAA |
| GGACAAGTTGGAGGACAGGAG | Novel | NNNRRT |
| GGACACCTGGCCAGACGCCAA | Novel | NNNRRT |
| GGACATGAACAAGAGATGAT | Novel | NAG |
| GGACCCCTTCTCGTGTTACA | Novel | NGC |
| GGACCCTGCGCTGAACATGG | Novel | NGA |
| GGACCTGCCTCGTCGTCTAA | Novel | NAA |
| GGACCTGCCTCGTCGTCTAAC | Novel | NNNRRT |
| GGACTTCTCTCAATTTTCTA | E15 | NGG |
| GGAGACCACCGTGAACGCCCA | Novel | NNGRRT |
| GGAGACCACCGTGAACGCCCA | Novel | NNNRRT |
| GGAGAGGACAACAGAGTTAT | Novel | NAG |
| GGAGAGGCAGTAGTCGGAAC | Novel | NGG |
| GGAGCAAACATTATCGGGAC | Novel | NGA |
| GGAGCTGGAGCATTCGGGCT | Novel | NGG |
| GGAGGTTGGTGAGTGATTGG | Novel | NGG |
| GGAGTCCGCGTAAAGAGAGG | Novel | NGC |
| GGAGTGCGAATCCACACTCC | Novel | NAA |
| GGAGTTCCGCAGTATGGATC | Novel | NGC |
| GGATAAAACCTAGCAGGCATA | Novel | NNNRRT |
| GGATAACCACATTGTGTAAA | Novel | NGG |
| GGATACATAGAGGTTCCTTG | Novel | NGC |
| GGATACGATGTATATTTGCG | Novel | NGA |
| GGATCCAACTGGTGGTCGGG | Novel | NAA |
| GGATCCAACTGGTGGTCGGGA | Novel | NNGRRT |
| GGATCCAACTGGTGGTCGGGA | Novel | NNNRRT |
| GGATCCTCAACCACCAGCAC | Novel | NGG |
| GGATCCTGGAATTAGAGGAC | Novel | NAA |
| GGATCGGCAGAGGAGCCGAA | Novel | NAG |
| GGATCTTGCAGAGTTTGGTG | Novel | NAA |
| GGATGAAGAGGAAGATGATA | Novel | NAA |
| GGATGAGTGTTTCTCAAAGG | Novel | NGG |
| GGATGATGGGATGGGAATAC | Novel | NGG |
| GGATTAAAGACAGGTACAGT | Novel | NGA |
| GGATTCTTTCCCGACCACCAG | Novel | NNGRRT |
| GGATTCTTTCCCGACCACCAG | Novel | NNNRRT |
| GGATTTGCTGGCAAAGTTTG | Novel | NAG |
| GGATTTGCTGTGTTTGCTCT | Novel | NAA |
| GGCAACATACCTTGATAGTC | Novel | NAG |
| GGCAACGGCCAGGTCTGTGC | Novel | NAA |
| GGCAAGCAATTCTTTGCTGG | M44 | NGG |
| GGCACAGACCTGGCCGTTGC | Novel | NGG |
| GGCACTAGTAAACTGAGCCA | Novel | NGA |
| GGCAGACGGAGAAGGGGACG | Novel | NGA |
| GGCAGACGGAGAAGGGGACGA | Novel | NNGRRT |
| GGCAGACGGAGAAGGGGACGA | Novel | NNNRRT |
| GGCAGATGAGAAGGCACAGA | Novel | NGG |
| GGCAGCAAAACCCAAAAGACC | Novel | NNNRRT |
| GGCAGGAGGCGGATTTGCTGG | Novel | NNNRRT |
| GGCATACTACAAACTTTGCC | Novel | NGC |
| GGCATACTACAAACTTTGCCA | Novel | NNNRRT |
| GGCATAGCAGCAGGATGAAG | Novel | NGG |
| GGCATGGACATCGACCCTTA | Novel | NAA |
| GGCCAGACGCCAACAAGGTA | Novel | NGA |
| GGCCCACTTACAGTTAATGA | Novel | NAA |
| GGCCCATATTAGTGTTGACA | Novel | NAA |
| GGCCTCAGCCCGTTTCTCCT | Novel | NGC |
| GGCCTCCGTGCGGTGGGGTG | Novel | NAA |
| GGCCTCTCACTCTGGGATCT | Novel | NGC |
| GGCCTGTATTTCCCTGCTGG | Novel | NGG |
| GGCCTTGTAAGTTGGCGAGA | Novel | NAG |
| GGCGAGAAAGTGAAAGCCTGC | Novel | NNNRRT |
| GGCGAGGGAGTTCTTCTTCT | Novel | NGG |
| GGCGATTGGTGGAGGCAGGA | Novel | NGC |
| GGCGATTGGTGGAGGCAGGAG | Novel | NNGRRT |
| GGCGATTGGTGGAGGCAGGAG | Novel | NNNRRT |
| GGCGGATTTGCTGGCAAAGTT | Novel | NNNRRT |
| GGCGGGGTTTTTCTTGTTGA | Novel | NAA |
| GGCGGGGTTTTTCTTGTTGAC | Novel | NNGRRT |
| GGCGGGGTTTTTCTTGTTGAC | Novel | NNNRRT |
| GGCGGGTATATTATATAAGA | Novel | NAG |
| GGCGTTCACGGTGGTCTCCA | Novel | NGC |
| GGCTAGGAGTTCCGCAGTAT | Novel | NGA |
| GGCTCCAGTTCAGGAGCAGT | Novel | NAA |
| GGCTGAGGCCCACTCCCATA | Novel | NGA |
| GGCTGGATCCAACTGGTGGT | Novel | NGG |
| GGCTTCCCGATACAGAGCTG | Novel | NGG |
| GGCTTCCCGATACAGAGCTGA | Novel | NNNRRT |
| GGCTTTCAGTTATATGGATGA | Novel | NNNRRT |
| GGCTTTCGGAAAATTCCTAT | Novel | NGG |
| GGGAAAGAATCCCAGAGGAT | Novel | NGC |
| GGGAAAGAATCCCAGAGGATT | Novel | NNNRRT |
| GGGAAAGCCCTACGAACCAC | Novel | NGA |
| GGGAACAAGATCTACAGCAT | M50 | NGG |
| GGGAAGCCTTAGAGTCTCCT | Novel | NAG |
| GGGACCATGCCGAACCTGCA | Novel | NGA |
| GGGACCCTGCGCTGAACATG | Novel | NAG |
| GGGACTGCGAATTTTGGCCA | Novel | NGA |
| GGGAGAGGCAGTAGTCGGAA | Novel | NAG |
| GGGAGGAGTTGGGGGAGGAGA | Novel | NNNRRT |
| GGGATACATAGAGGTTCCTT | Novel | NAG |
| GGGATACATAGAGGTTCCTTG | Novel | NNNRRT |
| GGGATCTTGCAGAGTTTGGT | Novel | NAA |
| GGGATCTTGCAGAGTTTGGTG | Novel | NNNRRT |
| GGGCAACATTCGGTGGGCGTT | Novel | NNNRRT |
| GGGCAACGGGGTAAAGGTTC | Novel | NGG |
| GGGCAGAATCTTTCCACCAG | Novel | NAA |
| GGGCATACTACAAACTTTGC | Novel | NAG |
| GGGCCAAGTCTGTACAGCATC | Novel | NNGRRT |
| GGGCCAAGTCTGTACAGCATC | Novel | NNNRRT |
| GGGCCATCAGCGCGTGCGTG | Novel | NAA |
| GGGCCTCAGCCCGTTTCTCC | Novel | NGG |
| GGGCGCACCTCTCTTTACGC | Novel | NGA |
| GGGCTGAGGCCCACTCCCAT | Novel | NGG |
| GGGCTTGGTCATGGGCCATC | Novel | NGC |
| GGGCTTTCGGAAAATTCCTA | Novel | NGG |
| GGGCTTTCGGAAAATTCCTAT | Novel | NNGRRT |
| GGGCTTTCGGAAAATTCCTAT | Novel | NNNRRT |
| GGGGAACTACCGTGTGTCTT | Novel | NGC |
| GGGGACCCTGCGCTGAACAT | Novel | NGA |
| GGGGACGAGAGAGTCCCAAG | Novel | NGA |
| GGGGACTGCGAATTTTGGCC | Novel | NAG |
| GGGGCATTTGGTGGTCTATA | Novel | NGC |
| GGGGCGCACCTCTCTTTACG | Novel | NGG |
| GGGGCTTGGTCATGGGCCAT | Novel | NAG |
| GGGGGAACTACCGTGTGTCT | Novel | NGG |
| GGGGGAGGAGATTAGATTAA | Novel | NGG |
| GGGGTGAAACCCAGCCCGAA | Novel | NGC |
| GGGGTGGAGCCCTCAGGCTC | Novel | NGG |
| GGGGTTTTTCTTGTTGACAA | Novel | NAA |
| GGGTAGGCTGCCTTCCTGTC | Novel | NGG |
| GGGTAGGCTGCCTTCCTGTCT | Novel | NNNRRT |
| GGGTATATTATATAAGAGAG | Novel | NAA |
| GGGTATTAAACCTTATTATC | Novel | NAG |
| GGGTCACCATATTCTTGGGAA | Novel | NNNRRT |
| GGGTCCTAGGAATCCTGATG | Novel | NGA |
| GGGTCGATGTCCATGCCCCA | Novel | NAG |
| GGGTCGTCCGCAGGATTCAG | Novel | NGC |
| GGGTGGAGCCCTCAGGCTCA | Novel | NGG |
| GGGTGTTAATTTGGAAGATC | Novel | NAG |
| GGGTTACTCTCTGAATTTTA | Novel | NGG |
| GGGTTGCGTCAGCAAACACT | Novel | NGG |
| GGGTTTAAATGTATACCCAA | Novel | NGA |
| GGGTTTACTGCTCCTGAACT | Novel | NGA |
| GGGTTTCACCCCACCGCACG | Novel | NAG |
| GGTAAATATTTGGTAACCTT | Novel | NGG |
| GGTAACCTTTGGATAAAACC | Novel | NAG |
| GGTAGGAGCTGGAGCATTCG | Novel | NGC |
| GGTAGGCTGCCTTCCTGTCT | Novel | NGC |
| GGTAGTTCCCCCTAGAAAAT | Novel | NGA |
| GGTATACATTTAAACCCTAA | Novel | NAA |
| GGTATTAAACCTTATTATCC | Novel | NGA |
| GGTATTGTGAGGATTCTTGT | Novel | NAA |
| GGTCACCATATTCTTGGGAA | Novel | NAA |
| GGTCATGGGCCATCAGCGCG | Novel | NGC |
| GGTCCCGTGCTGGTGGTTGA | Novel | NGA |
| GGTCGATGTCCATGCCCCAA | Novel | NGC |
| GGTCGGAACGGCAGACGGAG | Novel | NAG |
| GGTCGGGAAAGAATCCCAGA | Novel | NGA |
| GGTCGGTCGGAACGGCAGAC | Novel | NGA |
| GGTCGGTCGTTGACATTGCA | Novel | NAG |
| GGTCTCAATCGCCGCGTCGC | M76 | NGA |
| GGTCTCAATCGCCGCGTCGCA | M13 | NNNRRT |
| GGTCTCCATGCGACGTGCAG | M63 | NGG |
| GGTCTCTAGATGCTGGATCTT | Novel | NNNRRT |
| GGTCTGGAGCAAACATTATC | Novel | NGG |
| GGTCTGTGCCAAGTGTTTGC | Novel | NGA |
| GGTGAGGTGAACAATGCTCA | Novel | NGA |
| GGTGAGTGATTGGAGGTTGG | Novel | NGA |
| GGTGCAATTTCCGTCCGAAGG | Novel | NNNRRT |
| GGTGCGCCCCGTGGTCGGTC | Novel | NGA |
| GGTGGAAAGATTCTGCCCCA | Novel | NGC |
| GGTGGAGCCCTCAGGCTCAG | Novel | NGC |
| GGTGGGGTGAAACCCAGCCC | Novel | NAA |
| GGTGGTCGGGAAAGAATCCC | Novel | NGA |
| GGTGGTCGGGAAAGAATCCC | Novel | NNAGGA |
| GGTGGTCGGGAAAGAATCCCA | Novel | NNGRRT |
| GGTGGTCGGGAAAGAATCCCA | Novel | NNNRRT |
| GGTGGTCTCCATGCGACGTG | Novel | NAG |
| GGTGGTCTCCATGCGACGTGC | M33 | NNNRRT |
| GGTGTAAATGTATATTAGGA | Novel | NAA |
| GGTGTTAATTTGGAAGATCC | Novel | NGC |
| GGTGTTTTCCAATGAGGATT | Novel | NAA |
| GGTTACCAAATATTTACCAT | Novel | NGG |
| GGTTACTCTCTGAATTTTAT | Novel | NGG |
| GGTTATGTCATTGGAAGTTA | Novel | NGG |
| GGTTCAGGTATTGTTTACAC | Novel | NGA |
| GGTTCCACGCACGCGCTGAT | Novel | NGC |
| GGTTCCTTGAGCAGTAGTCA | Novel | NGC |
| GGTTCCTTGAGCAGTAGTCAT | Novel | NNNRRT |
| GGTTCGGCATGGTCCCGTGC | Novel | NGG |
| GGTTCGGCATGGTCCCGTGCT | Novel | NNNRRT |
| GGTTGAGGATCCTGGAATTA | Novel | NAG |
| GGTTGCGTCAGCAAACACTT | Novel | NGC |
| GGTTGGGGACTGCGAATTTT | Novel | NGC |
| GGTTTAATACCCTTATCCAA | Novel | NGG |
| GGTTTACTGCTCCTGAACTG | Novel | NAG |
| GGTTTCACCCCACCGCACGG | Novel | NGG |
| GGTTTGGTACAGCAACAGGA | Novel | NGG |
| GGTTTTATCCAAAGGTTACC | Novel | NAA |
| GTAAACAAAGGACGTCCCGC | Novel | NNAGGA |
| GTAAACAAAGGACGTCCCGCG | Novel | NNGRRT |
| GTAAACAAAGGACGTCCCGCG | Novel | NNNRRT |
| GTAAACCCTGTTCCGACTAC | Novel | NGC |
| GTAAACTGAGCCAGGAGAAA | Novel | NGG |
| GTAAAGAGAGGTGCGCCCCG | Novel | NGG |
| GTAAATAGTGTCTAGTTTGG | Novel | NAG |
| GTAAATAGTGTCTAGTTTGGA | Novel | NNNRRT |
| GTAAATATTTGGTAACCTTT | Novel | NGA |
| GTAAATGGGGCAGCAAAACC | Novel | NAA |
| GTAACACGAGAAGGGGTCCT | Novel | NGG |
| GTAACCTTTGGATAAAACCT | Novel | NGC |
| GTAAGACCTTGGGCAACATT | Novel | NGG |
| GTAAGTTGGCGAGAAAGTGA | Novel | NAG |
| GTACGAGATCTTCTAGATAC | Novel | NGC |
| GTACTAGGAGGCTGTAGGCA | Novel | NAA |
| GTACTGAAGGAAAGAAGTCA | Novel | NAA |
| GTAGAAGAATAAAGACCAGT | Novel | NAA |
| GTAGCTCCAAATTCTTTATA | Novel | NGG |
| GTAGGAGCTGGAGCATTCGGG | Novel | NNGRRT |
| GTAGGAGCTGGAGCATTCGGG | Novel | NNNRRT |
| GTAGGCATAAATTGGTCTGC | Novel | NNACCA |
| GTAGGCCCACTTACAGTTAA | Novel | NGA |
| GTAGTATGCCCTGAGCCTGA | Novel | NGG |
| GTAGTCAGTTATGTCAACAC | Novel | NAA |
| GTAGTCATGCAGGTTCGGCA | Novel | NGG |
| GTAGTCGGAACAGGGTTTAC | Novel | NGC |
| GTAGTTCCCCCTAGAAAATT | Novel | NAG |
| GTAGTTTCCGGAAGTGTTGA | Novel | NAG |
| GTATACATTTAAACCCTAAC | Novel | NAA |
| GTATACCCAAAGACAAAAGA | Novel | NAA |
| GTATCTAGAAGATCTCGTAC | Novel | NGA |
| GTATGATGTGTTCTTGTGGC | Novel | NAG |
| GTATGCATGTATTCAATCTA | Novel | NGC |
| GTATGGATCGGCAGAGGAGC | Novel | NGA |
| GTATTAAACCTTATTATCCA | Novel | NAA |
| GTATTCCCATCCCATCATCC | Novel | NGG |
| GTATTTGGTGTCTTTCGGAGT | Novel | NNGRRT |
| GTATTTGGTGTCTTTCGGAGT | Novel | NNNRRT |
| GTCAACACTAATATGGGCCT | Novel | NAA |
| GTCAATCTTCTCGAGGATTG | Novel | NGG |
| GTCACCATATTCTTGGGAAC | Novel | NAG |
| GTCATTAGTTCCCCCCAGCA | Novel | NAG |
| GTCCAAGAGTCCTCTTATGT | Novel | NAG |
| GTCCAAGGAATACTAACATT | Novel | NAG |
| GTCCACCACGAGTCTAGACTC | E16/M2 | NNNRRT |
| GTCCAGAAGAACCAACAAGA | Novel | NGA |
| GTCCATGCCCCAAAGCCACC | Novel | NAA |
| GTCCCAAGCGACCCCGAGAA | Novel | NGG |
| GTCCCGATAATGTTTGCTCC | Novel | NGA |
| GTCCCGCGCAGGATCCAGTT | Novel | NGC |
| GTCCCGTCGGCGCTGAATCC | Novel | NGC |
| GTCCGGCAGATGAGAAGGCA | Novel | NAG |
| GTCCTACTGTTCAAGCCTCC | Novel | NAG |
| GTCCTCTTATGTAAGACCTT | Novel | NGG |
| GTCCTTTGTTTACGTCCCGT | Novel | NGG |
| GTCGCAGAAGATCTCAATCT | Novel | NGG |
| GTCGGAACGGCAGACGGAGA | Novel | NGG |
| GTCGGTCGGAACGGCAGACG | Novel | NAG |
| GTCGGTCGTTGACATTGCAG | Novel | NGA |
| GTCTAACAACAGTAGTTTCC | Novel | NGA |
| GTCTAGACTCTGCGGTATTG | Novel | NGA |
| GTCTAGACTCTGCGGTATTG | Novel | NNAGGA |
| GTCTAGACTCTGCGGTATTGT | Novel | NNGRRT |
| GTCTAGACTCTGCGGTATTGT | Novel | NNNRRT |
| GTCTATAAGCTGGAGGAGTG | Novel | NGA |
| GTCTCAATCGCCGCGTCGCA | Novel | NAA |
| GTCTGCGCACCAGCACCATG | Novel | NAA |
| GTCTGGAGCAAACATTATCG | Novel | NGA |
| GTCTGGCCAGGTGTCCTTGT | Novel | NGG |
| GTCTGGCGATTGGTGGAGGC | Novel | NGG |
| GTCTGTGCCTTCTCATCTGC | Novel | NGG |
| GTCTTACATAAGAGGACTCT | Novel | NGG |
| GTCTTGGTGTAAATGTATAT | Novel | NAG |
| GTCTTTAAACAAACAGTCTT | Novel | NGA |
| GTCTTTGAAGTATGCCTCAAG | Novel | NNNRRT |
| GTCTTTGTACTAGGAGGCTG | Novel | NAG |
| GTGAAAAAGTTGCATGGTGC | Novel | NGG |
| GTGAAACCACAAGAGTTGCC | Novel | NGA |
| GTGAGAGGCCTGTATTTCCC | Novel | NGC |
| GTGAGAGGCCTGTATTTCCCT | Novel | NNNRRT |
| GTGAGGATTCTTGTCAACAA | Novel | NAA |
| GTGAGGTGAACAATGCTCAG | Novel | NAG |
| GTGATGTTCTCCATGTTCAG | Novel | NGC |
| GTGCACACGGTCCGGCAGAT | Novel | NAG |
| GTGCAGTATGGTGAGGTGAA | Novel | NAA |
| GTGCCAAGTGTTTGCTGACG | Novel | NAA |
| GTGCGAATCCACACTCCGAA | Novel | NGA |
| GTGCGCCCCGTGGTCGGTCG | Novel | NAA |
| GTGCTGCCAACTGGATCCTG | Novel | NGC |
| GTGCTGGTGGTTGAGGATCC | Novel | NGG |
| GTGGACTTCTCTCAATTTTC | Novel | NAG |
| GTGGAGACAGCGGGGTAGGC | Novel | NGC |
| GTGGAGGCAGGAGGCGGATT | Novel | NGC |
| GTGGGTCACCATATTCTTGG | Novel | NAA |
| GTGGGTCTTTTGGGTTTTGC | Novel | NGC |
| GTGGTCGGGAAAGAATCCCA | Novel | NAG |
| GTGGTCTCCATGCGACGTGC | M93 | NGA |
| GTGGTTGAGGATCCTGGAAT | Novel | NAG |
| GTGTAAATAGTGTCTAGTTT | Novel | NGA |
| GTGTAAATGTATATTAGGAA | Novel | NAG |
| GTGTGGATTCGCACTCCTCC | Novel | NGC |
| GTGTTGACATAACTGACTAC | Novel | NAG |
| GTGTTTCTCAAAGGTGGAGA | Novel | NAG |
| GTGTTTTCCAATGAGGATTA | Novel | NAG |
| GTTAATCATTACTTCCAAAC | Novel | NAG |
| GTTACCAAATATTTACCATT | Novel | NGA |
| GTTACCAATTTTCTTTTGTCT | Novel | NNGRRT |
| GTTACCAATTTTCTTTTGTCT | Novel | NNNRRT |
| GTTAGTATTCCTTGGACTCA | Novel | NAA |
| GTTATCGCTGGATGTGTCTG | Novel | NGG |
| GTTATGGGTCCTTGCCACAA | Novel | NAA |
| GTTATGTCAACACTAATATG | Novel | NGC |
| GTTATGTCATTGGAAGTTAT | Novel | NGG |
| GTTCACATTTTTTGATAATGT | Novel | NNNRRT |
| GTTCAGGTATTGTTTACACA | Novel | NAA |
| GTTCCCCACCTTATGAGTCC | Novel | NAG |
| GTTCCCCACCTTATGAGTCCA | Novel | NNGRRT |
| GTTCCCCACCTTATGAGTCCA | Novel | NNNRRT |
| GTTCCCCCTAGAAAATTGAG | Novel | NGA |
| GTTCCGCAGTATGGATCGGC | E17 | NGA |
| GTTCCGCAGTATGGATCGGC | Novel | NNAGGA |
| GTTCTTGTGGCAAGGACCCA | Novel | NAA |
| GTTGACATTGCAGAGAGTCC | Novel | NAG |
| GTTGAGGATCCTGGAATTAG | Novel | NGG |
| GTTGATAGGATAGGGGCATT | Novel | NGG |
| GTTGATAGGATAGGGGCATTT | Novel | NNNRRT |
| GTTGCATGGTGCTGGTGCGC | Novel | NGA |
| GTTGCATGGTGCTGGTGCGC | Novel | NNACCA |
| GTTGCCCAAGGTCTTACATA | Novel | NGA |
| GTTGCCCAAGGTCTTACATA | Novel | NNAGGA |
| GTTGCCGGGCAACGGGGTAA | Novel | NGG |
| GTTGGAGGACAGGAGGTTGG | Novel | NGA |
| GTTGGATCCAGCCTTCAGAG | Novel | NAA |
| GTTGGGGGAGGAGATTAGAT | Novel | NAA |
| GTTGGGGGAGGAGATTAGATT | Novel | NNNRRT |
| GTTGGTGAGTGATTGGAGGT | Novel | NGG |
| GTTGGTTCTTCTGGACTATC | Novel | NAG |
| GTTTAAAGACTGGGAGGAGT | Novel | NGG |
| GTTTAATACCCTTATCCAATG | Novel | NNNRRT |
| GTTTACACAGAAAGGCCTTG | Novel | NAA |
| GTTTACGTCCCGTCGGCGCT | Novel | NAA |
| GTTTACTAGTGCCATTTGTT | Novel | NAG |
| GTTTACTAGTGCCATTTGTTC | Novel | NNNRRT |
| GTTTACTGCTCCTGAACTGG | Novel | NGC |
| GTTTCACCCCACCGCACGGA | Novel | NGC |
| GTTTCTCAAAGGTGGAGACAG | Novel | NNGRRT |
| GTTTCTCAAAGGTGGAGACAG | Novel | NNNRRT |
| GTTTGCTCCAGACCTGCTGC | Novel | NAG |
| GTTTGGAAGTAATGATTAAC | Novel | NAG |
| GTTTGGTACAGCAACAGGAG | Novel | NGA |
| GTTTGTTTAAAGACTGGGAG | Novel | NAG |
| GTTTTCCAATGAGGATTAAAG | M15 | NNNRRT |
| GTTTTGCTCGCAGCAGGTCT | Novel | NGA |
| GTTTTGCTGCCCCATTTACA | Novel | NAA |
| TAAAACCTAGCAGGCATAAT | Novel | NAA |
| TAAAACGCCGCAGACACATC | Novel | NAG |
| TAAAACGCCGCAGACACATCC | E18 | NNNRRT |
| TAAACAAAGGACGTCCCGCG | Novel | NAG |
| TAAACCCTAACAAAACAAAG | Novel | NGA |
| TAAACCTTATTATCCAGAACA | Novel | NNNRRT |
| TAAACTGAGCCAGGAGAAAC | Novel | NGG |
| TAAAGAATTTGGAGCTACTG | Novel | NGG |
| TAAAGACAGGTACAGTAGAA | Novel | NAA |
| TAAAGACTGGGAGGAGTTGG | Novel | NGG |
| TAAAGAGAGGTGCGCCCCGTG | Novel | NNNRRT |
| TAAAGGTCTTTGTACTAGGA | Novel | NGC |
| TAAAGTTCAGGCAACTCTTG | Novel | NGG |
| TAAATGGGGCAGCAAAACCC | Novel | NAA |
| TAAATGTATACCCAAAGACA | Novel | NAA |
| TAACACCCACCCAGGTAGCT | Novel | NGA |
| TAACACGAGAAGGGGTCCTA | Novel | NGA |
| TAACAGCGGTAAAAAGGGACT | Novel | NNNRRT |
| TAACAGGCCTATTGATTGGA | Novel | NAG |
| TAACATTGAGGTTCCCGAGAT | Novel | NNNRRT |
| TAACCACATTGTGTAAATGG | Novel | NGC |
| TAACCAGGACAAGTTGGAGG | Novel | NNAGGA |
| TAACTAGATGTTCTGGATAA | Novel | NAA |
| TAACTGAAAGCCAAACAGTG | Novel | NGG |
| TAACTGACTACTAGGTCTCT | Novel | NGA |
| TAAGAGGACTCTTGGACTCTC | Novel | NNNRRT |
| TAAGCAGGCTTTCACTTTCT | Novel | NGC |
| TAAGGGAGAGGCAGTAGTCG | Novel | NAA |
| TAAGGTTTAATACCCTTATC | Novel | NAA |
| TAAGGTTTAATACCCTTATCC | Novel | NNNRRT |
| TAAGTTGGCGAGAAAGTGAA | Novel | NGC |
| TAATAAGGTTTAATACCCTTA | Novel | NNNRRT |
| TAATACCCTTATCCAATGGT | Novel | NAA |
| TAATATACCCGCCTTCCATA | Novel | NAG |
| TAATATGGGCCTAAAGTTCA | Novel | NGC |
| TAATCTCCTCCCCCAACTCCT | Novel | NNNRRT |
| TAATGAGAAAAGAAGATTGCA | Novel | NNNRRT |
| TAATGATTAACTAGATGTTC | Novel | NGG |
| TAATGCCCTTGTATGCATGTA | Novel | NNNRRT |
| TACAAACTGTTCACATTTTT | Novel | NGA |
| TACAAACTGTTCACATTTTTT | Novel | NNNRRT |
| TACACAATGTGGTTATCCTGC | M31 | NNNRRT |
| TACACCAAGACATTATCAAA | Novel | NAA |
| TACAGAGCTGAGGCGGTATC | Novel | NAG |
| TACAGGTGCAATTTCCGTCC | Novel | NAA |
| TACAGTAGAAGAATAAAGAC | Novel | NAG |
| TACATCGTATCCATGGCTGC | Novel | NAG |
| TACCAATTTTCTTTTGTCTT | Novel | NGG |
| TACCACATCATCCATATAAC | M71 | NGA |
| TACCATTGGATAAGGGTATT | Novel | NAA |
| TACCCCGCTGTCTCCACCTT | Novel | NGA |
| TACCCCGTTGCCCGGCAACGG | Novel | NNNRRT |
| TACCCGCCTTCCATAGAGTGT | Novel | NNNRRT |
| TACCGCAGAGTCTAGACTCG | M34 | NGG |
| TACCGCCTCAGCTCTGTATC | Novel | NGG |
| TACCTGAACCTTTACCCCGT | Novel | NGC |
| TACCTGGGTGGGTGTTAATT | Novel | NGG |
| TACCTGTCTTTAATCCTCAT | Novel | NGG |
| TACCTTGTTGGCGTCTGGCC | Novel | NGG |
| TACGATGTATATTTGCGGGA | Novel | NAG |
| TACTAACATTGAGGTTCCCG | E24_splice | NGA |
| TACTAGGAGGCTGTAGGCAT | Novel | NAA |
| TACTAGTGCCATTTGTTCAG | Novel | NGG |
| TACTGAAGGAAAGAAGTCAG | Novel | NAG |
| TACTGCCTCTCCCTTATCGT | Novel | NAA |
| TACTTCAAAGACTGTTTGTT | Novel | NAA |
| TACTTTCCAATCAATAGGCCT | M29 | NNNRRT |
| TAGAAAACTTCCTATTAACA | Novel | NGC |
| TAGAAGAATAAAGACCAGTA | Novel | NAG |
| TAGAAGATCTCGTACTGAAG | Novel | NAA |
| TAGACTCTGCGGTATTGTGA | Novel | NGA |
| TAGAGTATTTGGTGTCTTTC | Novel | NGA |
| TAGAGTCATTAGTTCCCCCC | Novel | NGC |
| TAGAGTGTGTAAATAGTGTC | Novel | NAG |
| TAGATGTTCTGGATAATAAGG | Novel | NNNRRT |
| TAGATTAAAGGTCTTTGTAC | Novel | NAG |
| TAGATTGAATACATGCATAC | Novel | NAG |
| TAGCAGCAGGATGAAGAGGA | Novel | NGA |
| TAGCAGCAGGATGAAGAGGAA | Novel | NNNRRT |
| TAGCCGCTTGTTTTGCTCGC | Novel | NGC |
| TAGCCGCTTGTTTTGCTCGCA | Novel | NNNRRT |
| TAGCTCCAAATTCTTTATAA | Novel | NGG |
| TAGGAAAAGATGGTGTTTTC | Novel | NAA |
| TAGGAATTTTCCGAAAGCCC | Novel | NGG |
| TAGGACCCCTTCTCGTGTTA | Novel | NAG |
| TAGGCAGAGGTGAAAAAGTTG | Novel | NNNRRT |
| TAGGCCCACTTACAGTTAAT | Novel | NAG |
| TAGGCTGCCTTCCTGTCTGG | Novel | NGA |
| TAGGGCTTTCCCCCACTGTT | Novel | NGG |
| TAGGGGCATTTGGTGGTCTA | Novel | NAA |
| TAGGGTTTAAATGTATACCC | Novel | NAA |
| TAGTACAAAGACCTTTAATC | Novel | NAA |
| TAGTATGCCCTGAGCCTGAG | Novel | NGC |
| TAGTATTCCTTGGACTCATA | Novel | NGG |
| TAGTCCAGAAGAACCAACAA | Novel | NAA |
| TAGTGTTGACATAACTGACTA | Novel | NNNRRT |
| TAGTTCCCCCTAGAAAATTG | Novel | NGA |
| TAGTTTCCGGAAGTGTTGAT | Novel | NGG |
| TAGTTTGGAAGTAATGATTAA | Novel | NNNRRT |
| TATAACGGTTTCTCTTCCAA | Novel | NAG |
| TATAACTGAAAGCCAAACAG | Novel | NGG |
| TATAAGAGAGAAACAACACA | Novel | NAG |
| TATAATATACCCGCCTTCCA | Novel | NAG |
| TATACATTTAAACCCTAACA | Novel | NAA |
| TATACCCAAAGACAAAAGAAA | M7 | NNNRRT |
| TATAGAGTATTTGGTGTCTTT | Novel | NNGRRT |
| TATAGAGTATTTGGTGTCTTT | Novel | NNNRRT |
| TATATGGATGATGTGGTATT | Novel | NGG |
| TATATTATATAAGAGAGAAA | Novel | NAA |
| TATATTTGCGGGAGAGGACAA | Novel | NNGRRT |
| TATATTTGCGGGAGAGGACAA | Novel | NNNRRT |
| TATCATCTTCCTCTTCATCC | Novel | NGC |
| TATCCATGGCTGCTAGGCTG | Novel | NGC |
| TATCCCTCCTGTTGCTGTAC | Novel | NAA |
| TATCCTATCAACACTTCCGG | Novel | NAA |
| TATCTAGAAGATCTCGTACT | Novel | NAA |
| TATCTAGAAGATCTCGTACT | Novel | NNAGGA |
| TATGATGTGTTCTTGTGGCA | Novel | NGG |
| TATGCCTCAAGGTCGGTCGT | Novel | NGA |
| TATGCCTGCTAGGTTTTATC | Novel | NAA |
| TATGCCTGCTAGGTTTTATCC | Novel | NNNRRT |
| TATGGATCGGCAGAGGAGCC | Novel | NAA |
| TATGGATGATGTGGTATTGG | M94 | NGG |
| TATGGTGACCCACAAAATGA | Novel | NGC |
| TATGGTGAGGTGAACAATGC | Novel | NNAGGA |
| TATGTAAGACCTTGGGCAACA | Novel | NNNRRT |
| TATGTATCCCTCCTGTTGCT | Novel | NNACCA |
| TATGTTGCCCGTTTGTCCTC | Novel | NAA |
| TATTAACAGGCCTATTGATT | Novel | NGA |
| TATTAACAGGCCTATTGATTG | Novel | NNNRRT |
| TATTAGGAAAAGATGGTGTTT | Novel | NNNRRT |
| TATTATCCAGAACATCTAGT | Novel | NAA |
| TATTCCCATCCCATCATCCT | Novel | NGG |
| TATTCCTTGGACTCATAAGG | Novel | NGG |
| TATTCTTCTACTGTACCTGTC | Novel | NNNRRT |
| TATTGATTGGAAAGTATGTCA | Novel | NNGRRT |
| TATTGATTGGAAAGTATGTCA | Novel | NNNRRT |
| TATTGGGGGCCAAGTCTGTA | Novel | NAG |
| TATTTACACACTCTATGGAA | Novel | NGC |
| TATTTACACACTCTATGGAAG | Novel | NNGRRT |
| TATTTACACACTCTATGGAAG | Novel | NNNRRT |
| TATTTCCCTGCTGGTGGCTC | Novel | NAG |
| TATTTGCGGGAGAGGACAAC | Novel | NGA |
| TATTTGGTAACCTTTGGATA | Novel | NAA |
| TCAACACTAATATGGGCCTA | Novel | NAG |
| TCAACGAATTGTGGGTCTTT | M61 | NGG |
| TCAAGATGCTGTACAGACTT | Novel | NGC |
| TCAAGGTCGGTCGTTGACAT | Novel | NGC |
| TCAATAGGCCTGTTAATAGG | Novel | NAG |
| TCAATCCCAACAAGGACACC | M52 | NGG |
| TCAATCTTCTCGAGGATTGG | Novel | NGA |
| TCACCAAACTCTGCAAGATCC | Novel | NNGRRT |
| TCACCAAACTCTGCAAGATCC | Novel | NNNRRT |
| TCACCATACTGCACTCAGGC | Novel | NAG |
| TCACCATACTGCACTCAGGCA | Novel | NNNRRT |
| TCACCATATTCTTGGGAACA | Novel | NGA |
| TCACCTCACCATACTGCACT | Novel | NAG |
| TCACCTCTGCACGTCGCATG | Novel | NAG |
| TCACTCTGGGATCTTGCAGAG | Novel | NNNRRT |
| TCACTTTCTCGCCAACTTAC | Novel | NAG |
| TCAGAAGGCAAAAACGAGAG | Novel | NAA |
| TCAGCCCGTTTCTCCTGGCT | Novel | NAG |
| TCAGGCAAGCAATTCTTTGC | M41 | NGG |
| TCAGGCTCAGGGCATACTAC | Novel | NAA |
| TCAGGGCATACTACAAACTT | Novel | NGC |
| TCAGGTATTGTTTACACAGA | Novel | NAG |
| TCAGTTTACTAGTGCCATTTG | Novel | NNNRRT |
| TCATCCATATAACTGAAAGC | Novel | NAA |
| TCATTAGTTCCCCCCAGCAA | Novel | NGA |
| TCCAAATTCTTTATAAGGGT | Novel | NGA |
| TCCAACTGGTGGTCGGGAAA | Novel | NAA |
| TCCAACTTGTCCTGGTTATCG | Novel | NNGRRT |
| TCCAACTTGTCCTGGTTATCG | Novel | NNNRRT |
| TCCAAGAGTCCTCTTATGTA | Novel | NGA |
| TCCAAGGAATACTAACATTG | M46 | NGG |
| TCCAATCAATAGGCCTGTTA | Novel | NNAGGA |
| TCCACACTCCGAAAGACACC | Novel | NAA |
| TCCACCAATCGCCAGACAGG | Novel | NAG |
| TCCACCACGAGTCTAGACTC | Novel | NGC |
| TCCACCCCAAAAGGCCTCCG | Novel | NGC |
| TCCAGCATCTAGAGACCTAG | Novel | NAG |
| TCCAGCCTTCAGAGCAAACA | Novel | NAG |
| TCCAGTTGGCAGCACAGCCT | Novel | NGC |
| TCCATGCCCCAAAGCCACCC | Novel | NAG |
| TCCATGCGACGTGCAGAGGT | Novel | NAA |
| TCCCAACAAGGACACCTGGC | Novel | NAG |
| TCCCAAGAATATGGTGACCCA | M20 | NNNRRT |
| TCCCAGAGGATTGCTGGTGG | Novel | NAA |
| TCCCATAGGAATTTTCCGAA | Novel | NGC |
| TCCCATCATCCTGGGCTTTC | Novel | NGA |
| TCCCATCATCCTGGGCTTTCG | Novel | NNNRRT |
| TCCCCAATCCTCGAGAAGAT | M85 | NGA |
| TCCCCAATCCTCGAGAAGATT | M24 | NNNRRT |
| TCCCCACCTTATGAGTCCAA | Novel | NGA |
| TCCCCCTAGAAAATTGAGAG | Novel | NAG |
| TCCCGACCACCAGTTGGATC | Novel | NAG |
| TCCCTGCTGGTGGCTCCAGT | Novel | NNAGGA |
| TCCCTTATCGTCAATCTTCT | Novel | NGA |
| TCCCTTATCGTCAATCTTCT | Novel | NNAGGA |
| TCCCTTATCGTCAATCTTCTC | Novel | NNGRRT |
| TCCCTTATCGTCAATCTTCTC | Novel | NNNRRT |
| TCCCTTTTTACCGCTGTTAC | Novel | NAA |
| TCCGAAAGCCCAGGATGATG | Novel | NGA |
| TCCGAAGGTTTGGTACAGCA | Novel | NNAGGA |
| TCCGCAGGATTCAGCGCCGA | Novel | NGG |
| TCCGCAGTATGGATCGGCAG | E19 | NGG |
| TCCGGAAGTGTTGATAGGAT | Novel | NGG |
| TCCGGCAGATGAGAAGGCAC | Novel | NGA |
| TCCGTCCGAAGGTTTGGTAC | Novel | NGC |
| TCCTAATATACATTTACACC | Novel | NAG |
| TCCTACCTTGTTGGCGTCTGG | Novel | NNNRRT |
| TCCTACTGTTCAAGCCTCCA | Novel | NGC |
| TCCTAGCCGCTTGTTTTGCT | Novel | NGC |
| TCCTAGTACAAAGACCTTTAA | Novel | NNNRRT |
| TCCTCCAGCTTATAGACCAC | Novel | NAA |
| TCCTCGAGAAGATTGACGAT | Novel | NAG |
| TCCTCTAATTCCAGGATCCT | Novel | NAA |
| TCCTCTAATTCCAGGATCCT | Novel | NNACCA |
| TCCTCTGCCGATCCATACTG | E20 | NGG |
| TCCTCTTATGTAAGACCTTG | Novel | NGC |
| TCCTCTTCATCCTGCTGCTA | Novel | NGC |
| TCCTGAACTGGAGCCACCAG | Novel | NAG |
| TCCTGCCTCCACCAATCGCC | Novel | NGA |
| TCCTGCGGACGACCCTTCTC | Novel | NGG |
| TCCTGGAATTAGAGGACAAA | Novel | NGG |
| TCCTGTCCTCCAACTTGTCC | Novel | NGG |
| TCCTGTCTGGCGATTGGTGG | Novel | NGG |
| TCCTTCAGTACGAGATCTTC | Novel | NAG |
| TCCTTGAGCAGTAGTCATGC | Novel | NGG |
| TCCTTGGACTCATAAGGTGG | Novel | NGA |
| TCCTTTGTTTACGTCCCGTC | Novel | NGC |
| TCGACCCTTATAAAGAATTT | Novel | NGA |
| TCGAGAAGATTGACGATAAG | Novel | NGA |
| TCGCAGAAGATCTCAATCTC | Novel | NGG |
| TCGCAGACGAAGGTCTCAAT | Novel | NGC |
| TCGGAAAATTCCTATGGGAG | Novel | NGG |
| TCGGAACGGCAGACGGAGAA | Novel | NGG |
| TCGGCATGGTCCCGTGCTGG | Novel | NGG |
| TCGGCGCTGAATCCTGCGGA | Novel | NGA |
| TCGGTCGGAACGGCAGACGG | Novel | NGA |
| TCGGTCGTTGACATTGCAGA | Novel | NAG |
| TCGTACTGAAGGAAAGAAGT | Novel | NAG |
| TCGTCAATCTTCTCGAGGAT | Novel | NGG |
| TCGTCCGCAGGATTCAGCGC | Novel | NGA |
| TCGTTGACATACTTTCCAAT | Novel | NAA |
| TCTAACAACAGTAGTTTCCG | Novel | NAA |
| TCTAAGGCTTCCCGATACAG | Novel | NGC |
| TCTAATTCCAGGATCCTCAA | Novel | NNACCA |
| TCTAGAAGATCTCGTACTGA | Novel | NGG |
| TCTAGACTCTGCGGTATTGT | Novel | NAG |
| TCTAGTTAATCATTACTTCC | Novel | NAA |
| TCTAGTTTGGAAGTAATGAT | Novel | NAA |
| TCTATAACGGTTTCTCTTCC | Novel | NAA |
| TCTATAAGCTGGAGGAGTGC | Novel | NAA |
| TCTCAAAGGTGGAGACAGCG | Novel | NGG |
| TCTCAATCGCCGCGTCGCAG | Novel | NAG |
| TCTCACTCTGGGATCTTGCA | Novel | NAG |
| TCTCCGTCTGCCGTTCCGAC | Novel | NGA |
| TCTCCGTCTGCCGTTCCGAC | Novel | NNACCA |
| TCTCCTCCCCCAACTCCTCC | Novel | NAG |
| TCTCCTGAGCATTGTTCACC | Novel | NNACCA |
| TCTCTAGATGCTGGATCTTC | Novel | NAA |
| TCTCTCTTATATAATATACC | Novel | NGC |
| TCTCTTCCAAAAGTGAGACA | Novel | NGA |
| TCTGACTTCTTTCCTTCAGTA | Novel | NNNRRT |
| TCTGCAAGATCCCAGAGTGA | Novel | NAG |
| TCTGCCGTTCCGACCGACCA | Novel | NGG |
| TCTGGACTATCAAGGTATGT | Novel | NGC |
| TCTGGAGCAAACATTATCGGG | Novel | NNNRRT |
| TCTGGCCAGGTGTCCTTGTT | Novel | NGG |
| TCTGGCGATTGGTGGAGGCA | Novel | NGA |
| TCTGTGCCTTCTCATCTGCC | Novel | NGA |
| TCTTACATAAGAGGACTCTT | Novel | NGA |
| TCTTCCAAAAGTGAGACAAG | Novel | NAA |
| TCTTCTACTGTACCTGTCTT | Novel | NAA |
| TCTTCTGCGACGCGGCGATT | Novel | NAG |
| TCTTCTTTTCTCATTAACTG | Novel | NAA |
| TCTTGGACTCTCTGCAATGT | Novel | NAA |
| TCTTGGTGTAAATGTATATT | Novel | NGG |
| TCTTGTCTCACTTTTGGAAG | Novel | NGA |
| TCTTGTTCCCAAGAATATGG | Novel | NGA |
| TCTTTAAACAAACAGTCTTT | Novel | NAA |
| TCTTTAATCCTCATTGGAAA | Novel | NNACCA |
| TCTTTCCACCAGCAATCCTC | Novel | NGG |
| TCTTTGCTGGGGGGAACTAA | Novel | NGA |
| TCTTTGTACTAGGAGGCTGT | Novel | NGG |
| TCTTTGTTTTGTTAGGGTTT | Novel | NAA |
| TCTTTTCCTAATATACATTT | Novel | NNACCA |
| TGAAACCACAAGAGTTGCCT | Novel | NAA |
| TGAAAGCCAAACAGTGGGGG | Novel | NAA |
| TGAACAAGAGATGATTAGGC | Novel | NGA |
| TGAACAGTAGGACATGAACA | Novel | NGA |
| TGAACAGTTTGTAGGCCCACT | M17 | NNNRRT |
| TGAACATGGAGAACATCACA | Novel | NNAGGA |
| TGAACATGGAGAACATCACAT | Novel | NNGRRT |
| TGAACATGGAGAACATCACAT | Novel | NNNRRT |
| TGAACCTTTACCCCGTTGCC | Novel | NGG |
| TGAACTGGAGCCACCAGCAG | Novel | NGA |
| TGAAGAGGAAGATGATAAAA | Novel | NGC |
| TGAAGGCTGGATCCAACTGG | Novel | NGG |
| TGACATAACCCATAAAATTC | Novel | NGA |
| TGACATAACCCATAAAATTCA | Novel | NNGRRT |
| TGACATAACCCATAAAATTCA | Novel | NNNRRT |
| TGACATACTTTCCAATCAAT | Novel | NGG |
| TGACATTGCAGAGAGTCCAA | Novel | NAG |
| TGACCAAGCCCCAGCCAGTG | Novel | NGG |
| TGACGATAAGGGAGAGGCAG | Novel | NAG |
| TGACGCAACCCCCACTGGCT | Novel | NGG |
| TGACTACTAGGTCTCTAGATG | Novel | NNGRRT |
| TGACTACTAGGTCTCTAGATG | Novel | NNNRRT |
| TGACTTCTTTCCTTCAGTAC | Novel | NAG |
| TGAGAAAAGAAGATTGCAAT | Novel | NGA |
| TGAGACCTTCGTCTGCGAGG | Novel | NGA |
| TGAGATCTTCTGCGACGCGG | Novel | NGA |
| TGAGCCAGGAGAAACGGGCT | Novel | NAG |
| TGAGCCTGAGGGCTCCACCC | Novel | NAA |
| TGAGGATGAGTGTTTCTCAA | Novel | NGG |
| TGAGGATTCTTGTCAACAAG | Novel | NAA |
| TGAGGCATAGCAGCAGGATG | Novel | NAG |
| TGAGGTGAACAATGCTCAGG | Novel | NGA |
| TGAGTCCCTTTTTACCGCTG | Novel | NNACCA |
| TGAGTGCAGTATGGTGAGGT | Novel | NAA |
| TGAGTGCAGTATGGTGAGGTG | Novel | NNNRRT |
| TGAGTGTTTCTCAAAGGTGG | Novel | NGA |
| TGATAGTCCAGAAGAACCAA | Novel | NAA |
| TGATGGGATGGGAATACAGG | Novel | NGC |
| TGATGTTCTCCATGTTCAGCG | Novel | NNGRRT |
| TGATGTTCTCCATGTTCAGCG | Novel | NNNRRT |
| TGATTGGAAAGTATGTCAAC | Novel | NAA |
| TGATTGGAGGTTGGGGACTG | Novel | NGA |
| TGCAAGATCCCAGAGTGAGA | Novel | NGC |
| TGCAATTGATTATGCCTGCT | M48 | NGG |
| TGCACACGGTCCGGCAGATG | Novel | NGA |
| TGCATACAAGGGCATTAACG | Novel | NAG |
| TGCATGTATTCAATCTAAGC | Novel | NGG |
| TGCCAACTGGATCCTGCGCG | M189 | NGA |
| TGCCACAAGAACACATCATA | Novel | NAA |
| TGCCCAAGGTCTTACATAAG | Novel | NGG |
| TGCCCGTTTGTCCTCTAATT | Novel | NNAGGA |
| TGCCCGTTTGTCCTCTAATTC | Novel | NNGRRT |
| TGCCCGTTTGTCCTCTAATTC | Novel | NNNRRT |
| TGCCCTTGTATGCATGTATT | Novel | NAA |
| TGCCGAACCTGCATGACTAC | Novel | NGC |
| TGCCGTTCCGACCGACCACG | Novel | NGG |
| TGCCTACAGCCTCCTAGTAC | Novel | NAA |
| TGCCTCCACCAATCGCCAGA | Novel | NAG |
| TGCCTGAGTGCAGTATGGTG | Novel | NGG |
| TGCCTGCTAGGTTTTATCCA | Novel | NAG |
| TGCGACGTGCAGAGGTGAAG | Novel | NGA |
| TGCGAGCAAAACAAGCGGCT | Novel | NGG |
| TGCGGTGGGGTGAAACCCAGC | Novel | NNGRRT |
| TGCGGTGGGGTGAAACCCAGC | Novel | NNNRRT |
| TGCTAGGCTGTGCTGCCAAC | Novel | NGG |
| TGCTAGGTTTTATCCAAAGG | Novel | NNACCA |
| TGCTCCAGACCTGCTGCGAG | Novel | NAA |
| TGCTCCAGCTCCTACCTTGT | M54 | NGG |
| TGCTCCTGAACTGGAGCCAC | Novel | NAG |
| TGCTCGCAGCAGGTCTGGAG | Novel | NAA |
| TGCTGGCAAAGTTTGTAGTA | Novel | NGC |
| TGCTGGTGGCTCCAGTTCAG | Novel | NAG |
| TGCTGGTGGCTCCAGTTCAGG | Novel | NNNRRT |
| TGCTGGTGGTTGAGGATCCT | Novel | NGA |
| TGCTGTACAGACTTGGCCCC | Novel | NAA |
| TGCTGTACCAAACCTTCGGA | Novel | NGG |
| TGCTGTACCAAACCTTCGGAC | M26 | NNNRRT |
| TGCTGTAGATCTTGTTCCCA | Novel | NGA |
| TGGAAAACACCATCTTTTCC | Novel | NAA |
| TGGAAAGTATGTCAACGAATT | Novel | NNGRRT |
| TGGAAAGTATGTCAACGAATT | Novel | NNNRRT |
| TGGAACCTTTTCGGCTCCTC | Novel | NGC |
| TGGAACCTTTTCGGCTCCTCT | Novel | NNNRRT |
| TGGAAGGCGGGTATATTATA | Novel | NAA |
| TGGACATCGACCCTTATAAA | Novel | NAA |
| TGGACTCTCTGCAATGTCAA | Novel | NGA |
| TGGACTTCTCTCAATTTTCT | E21 | NGG |
| TGGATAAAACCTAGCAGGCA | Novel | NAA |
| TGGATACGATGTATATTTGC | Novel | NGG |
| TGGATCCAACTGGTGGTCGG | Novel | NAA |
| TGGATCGGCAGAGGAGCCGA | Novel | NAA |
| TGGATGATGTGGTATTGGGGG | Novel | NNNRRT |
| TGGATTTGCTGTGTTTGCTC | Novel | NGA |
| TGGCAAGGACCCATAACTTC | Novel | NAA |
| TGGCACTAGTAAACTGAGCC | Novel | NGG |
| TGGCAGCACAGCCTAGCAGCC | Novel | NNGRRT |
| TGGCAGCACAGCCTAGCAGCC | Novel | NNNRRT |
| TGGCCAAAATTCGCAGTCCC | Novel | NAA |
| TGGCCAGACGCCAACAAGGT | Novel | NGG |
| TGGCGATTGGTGGAGGCAGG | Novel | NGG |
| TGGCTCCAGTTCAGGAGCAG | Novel | NAA |
| TGGCTGCTAGGCTGTGCTGC | Novel | NAA |
| TGGCTTTGGGGCATGGACAT | Novel | NGA |
| TGGGAACAAGATCTACAGCA | M49 | NGG |
| TGGGACTTCAATCCCAACAA | Novel | NGA |
| TGGGATCTTGCAGAGTTTGG | Novel | NGA |
| TGGGATTCTTTCCCGACCAC | Novel | NAG |
| TGGGATTGAAGTCCCAATCT | Novel | NGA |
| TGGGCCATCAGCGCGTGCGT | Novel | NGA |
| TGGGGACCCTGCGCTGAACA | Novel | NGG |
| TGGGGACTGCGAATTTTGGC | Novel | NAA |
| TGGGGCAGAATCTTTCCACC | Novel | NGC |
| TGGGGGAGGAGATTAGATTA | Novel | NAG |
| TGGGGGGAACTAATGACTCT | Novel | NGC |
| TGGGGTGGAGCCCTCAGGCT | Novel | NAG |
| TGGGGTTACTCTCTGAATTTT | Novel | NNGRRT |
| TGGGGTTACTCTCTGAATTTT | Novel | NNNRRT |
| TGGGTGGGTGTTAATTTGGA | Novel | NGA |
| TGGGTTATGTCATTGGAAGTT | Novel | NNGRRT |
| TGGGTTATGTCATTGGAAGTT | Novel | NNNRRT |
| TGGGTTTCACCCCACCGCAC | Novel | NGA |
| TGGGTTTTGCTGCCCCATTTA | Novel | NNNRRT |
| TGGTCCCGTGCTGGTGGTTG | Novel | NGG |
| TGGTCGGGAAAGAATCCCAG | Novel | NGG |
| TGGTCGGTCGGAACGGCAGA | Novel | NGG |
| TGGTCTATAAGCTGGAGGAG | Novel | NGC |
| TGGTCTATAAGCTGGAGGAGT | Novel | NNGRRT |
| TGGTCTATAAGCTGGAGGAGT | Novel | NNNRRT |
| TGGTCTCCATGCGACGTGCA | Novel | NAG |
| TGGTCTGCGCACCAGCACCA | Novel | NGC |
| TGGTGACCCACAAAATGAGG | Novel | NGC |
| TGGTGAGGTGAACAATGCTC | Novel | NGG |
| TGGTGAGTGATTGGAGGTTG | Novel | NGG |
| TGGTGGCTCCAGTTCAGGAG | Novel | NAG |
| TGGTGGTCGGGAAAGAATCC | Novel | NAG |
| TGGTGGTCTATAAGCTGGAG | Novel | NAG |
| TGGTGTAAATGTATATTAGG | Novel | NAA |
| TGGTGTAAATGTATATTAGGA | Novel | NNNRRT |
| TGGTGTTTTCCAATGAGGAT | Novel | NAA |
| TGGTTATCGCTGGATGTGTC | Novel | NGC |
| TGGTTGAGGATCCTGGAATT | Novel | NGA |
| TGGTTGAGGATCCTGGAATT | Novel | NNAGGA |
| TGTAAATAGTGTCTAGTTTG | Novel | NAA |
| TGTAAATGTATATTAGGAAA | Novel | NGA |
| TGTAAATGTATATTAGGAAAA | Novel | NNNRRT |
| TGTAACACGAGAAGGGGTCC | Novel | NAG |
| TGTAACACGAGAAGGGGTCCT | Novel | NNGRRT |
| TGTAACACGAGAAGGGGTCCT | Novel | NNNRRT |
| TGTAAGTTGGCGAGAAAGTG | Novel | NAA |
| TGTACCAAACCTTCGGACGG | Novel | NAA |
| TGTAGATCTTGTTCCCAAGAA | Novel | NNNRRT |
| TGTAGGCATAAATTGGTCTG | Novel | NGC |
| TGTAGTATGCCCTGAGCCTG | Novel | NGG |
| TGTATACCCAAAGACAAAAG | Novel | NAA |
| TGTATATTTGCGGGAGAGGA | Novel | NAA |
| TGTATGATGTGTTCTTGTGG | Novel | NAA |
| TGTATGATGTGTTCTTGTGG | Novel | NNAGGA |
| TGTATGCATGTATTCAATCT | Novel | NAG |
| TGTCAACACTAATATGGGCC | Novel | NAA |
| TGTCAACGAATTGTGGGTCTT | M30 | NNGRRT |
| TGTCAACGAATTGTGGGTCTT | Novel | NNNRRT |
| TGTCCTACTGTTCAAGCCTC | Novel | NAA |
| TGTCCTTGTTGGGATTGAAGT | Novel | NNNRRT |
| TGTCTGGCGATTGGTGGAGG | Novel | NAG |
| TGTCTTGGTGTAAATGTATA | Novel | NNAGGA |
| TGTCTTTAATCCTCATTGGA | Novel | NAA |
| TGTCTTTCGGAGTGTGGATT | Novel | NGC |
| TGTGAGGATTCTTGTCAACA | Novel | NGA |
| TGTGCACTTCGCTTCACCTC | Novel | NGC |
| TGTGCCTTGGGTGGCTTTGG | Novel | NGC |
| TGTGGAGTTACTCTCGTTTT | Novel | NGC |
| TGTGGGTCACCATATTCTTG | Novel | NGA |
| TGTGTAAATAGTGTCTAGTT | Novel | NGG |
| TGTGTAAATAGTGTCTAGTTT | Novel | NNNRRT |
| TGTGTCTTGGCCAAAATTCG | Novel | NAG |
| TGTGTTGTTTCTCTCTTATA | Novel | NAA |
| TGTTAATAGGAAGTTTTCTA | Novel | NAA |
| TGTTAGTATTCCTTGGACTCA | Novel | NNNRRT |
| TGTTCATGTCCTACTGTTCA | Novel | NGC |
| TGTTCTCCATGTTCAGCGCA | Novel | NGG |
| TGTTGACATAACTGACTACT | Novel | NGG |
| TGTTGCCCAAGGTCTTACAT | Novel | NAG |
| TGTTGCTGTACCAAACCTTC | Novel | NGA |
| TGTTGGGATTGAAGTCCCAAT | Novel | NNGRRT |
| TGTTGGGATTGAAGTCCCAAT | Novel | NNNRRT |
| TGTTGGTTCTTCTGGACTAT | Novel | NAA |
| TGTTTACGTCCCGTCGGCGC | Novel | NGA |
| TGTTTCTCAAAGGTGGAGAC | Novel | NGC |
| TGTTTGCTCCAGACCTGCTG | Novel | NGA |
| TGTTTGGCTTTCAGTTATAT | Novel | NGA |
| TGTTTGGCTTTCAGTTATATG | Novel | NNNRRT |
| TGTTTGTTTAAAGACTGGGA | Novel | NGA |
| TGTTTTAGAAAACTTCCTAT | Novel | NAA |
| TGTTTTCCAATGAGGATTAA | M79 | NGA |
| TGTTTTGCTCGCAGCAGGTC | Novel | NGG |
| TTAAACCCTAACAAAACAAA | Novel | NAG |
| TTAAAGACAGGTACAGTAGA | Novel | NGA |
| TTAAAGACTGGGAGGAGTTG | Novel | NGG |
| TTAAAGGTCTTTGTACTAGG | Novel | NGG |
| TTAAATGTATACCCAAAGAC | Novel | NAA |
| TTAACACCCACCCAGGTAGC | Novel | NAG |
| TTAACAGGCCTATTGATTGG | Novel | NAA |
| TTAACTAGATGTTCTGGATAA | Novel | NNNRRT |
| TTAACTGTAAGTGGGCCTAC | Novel | NAA |
| TTAATACCCTTATCCAATGG | Novel | NAA |
| TTAATCATTACTTCCAAACT | Novel | NGA |
| TTAATGAGAAAAGAAGATTG | Novel | NAA |
| TTACACACTCTATGGAAGGC | Novel | NGG |
| TTACACCAAGACATTATCAA | Novel | NAA |
| TTACAGTTAATGAGAAAAGA | Novel | NGA |
| TTACCATTGGATAAGGGTAT | Novel | NAA |
| TTACCCCGTTGCCCGGCAAC | Novel | NGC |
| TTACGCGGACTCCCCGTCTG | Novel | NGC |
| TTACTCTCGTTTTTGCCTTC | Novel | NGA |
| TTACTGCTCCTGAACTGGAG | Novel | NNACCA |
| TTAGAAAACTTCCTATTAAC | Novel | NGG |
| TTAGATTAAAGGTCTTTGTA | Novel | NNAGGA |
| TTAGATTGAATACATGCATA | Novel | NAA |
| TTAGGCAGAGGTGAAAAAGT | Novel | NGC |
| TTAGGGTTTAAATGTATACC | Novel | NAA |
| TTAGTATTCCTTGGACTCAT | Novel | NAG |
| TTATATGGATGATGTGGTAT | Novel | NGG |
| TTATCAGTCCCGATAATGTT | Novel | NGC |
| TTATCGCTGGATGTGTCTGC | Novel | NGC |
| TTCAAAGACTGTTTGTTTAA | Novel | NGA |
| TTCAAGCCTCCAAGCTGTGCC | E22/M9 | NNGRRT |
| TTCAAGCCTCCAAGCTGTGCC | E22 | NNNRRT |
| TTCACCTCTGCACGTCGCAT | Novel | NGA |
| TTCACTTTCTCGCCAACTTA | Novel | NAA |
| TTCAGAGCAAACACAGCAAAT | M23 | NNNRRT |
| TTCAGGTATTGTTTACACAG | Novel | NAA |
| TTCCAAATTAACACCCACCC | Novel | NGG |
| TTCCAATGACATAACCCATA | Novel | NAA |
| TTCCAATGAGGATTAAAGAC | M47 | NGG |
| TTCCAGGATCCTCAACCACC | Novel | NGC |
| TTCCCCACCTTATGAGTCCA | Novel | NGG |
| TTCCCCCACTGTTTGGCTTT | Novel | NAG |
| TTCCCCCTAGAAAATTGAGA | Novel | NAA |
| TTCCCGAGATTGAGATCTTC | Novel | NGC |
| TTCCCGATACAGAGCTGAGG | Novel | NGG |
| TTCCGAAAGCCCAGGATGAT | Novel | NGG |
| TTCCGCAGTATGGATCGGCA | Novel | NAG |
| TTCCGGAAACTACTGTTGTT | Novel | NGA |
| TTCCGGAAGTGTTGATAGGA | Novel | NAG |
| TTCCGTCCGAAGGTTTGGTA | Novel | NAG |
| TTCCTAATATACATTTACAC | Novel | NAA |
| TTCCTATGGGAGTGGGCCTC | Novel | NGC |
| TTCCTGTCTGGCGATTGGTG | Novel | NAG |
| TTCCTTGAGCAGTAGTCATG | Novel | NAG |
| TTCCTTGGACTCATAAGGTG | Novel | NGG |
| TTCGCACTCCTCCAGCTTAT | Novel | NGA |
| TTCGCACTCCTCCAGCTTAT | Novel | NNACCA |
| TTCGCTTCACCTCTGCACGT | Novel | NGC |
| TTCTCAAAGGTGGAGACAGC | Novel | NGG |
| TTCTCATCTGCCGGACCGTG | Novel | NGC |
| TTCTCGAGGATTGGGGACCC | Novel | NGC |
| TTCTCTCAATTTTCTAGGGG | Novel | NAA |
| TTCTCTTCCAAAAGTGAGAC | Novel | NAG |
| TTCTCTTCCAAAAGTGAGACA | Novel | NNNRRT |
| TTCTTGGGAACAAGATCTAC | Novel | NGC |
| TTCTTGTCTCACTTTTGGAA | Novel | NAG |
| TTCTTTCCCGACCACCAGTT | Novel | NGA |
| TTGAACAGTAGGACATGAAC | Novel | NAG |
| TTGAACAGTAGGACATGAACA | Novel | NNNRRT |
| TTGAAGTCCCAATCTGGATT | Novel | NGC |
| TTGACATACTTTCCAATCAA | Novel | NAG |
| TTGACATTGCAGAGAGTCCA | Novel | NGA |
| TTGAGAAACACTCATCCTCA | Novel | NGC |
| TTGAGGATCCTGGAATTAGA | Novel | NGA |
| TTGATTGGAAAGTATGTCAA | Novel | NGA |
| TTGCAATCTTCTTTTCTCAT | Novel | NAA |
| TTGCAATTGATTATGCCTGC | Novel | NAG |
| TTGCATGGTGCTGGTGCGCAG | Novel | NNNRRT |
| TTGCCAGCAAATCCGCCTCC | Novel | NGC |
| TTGCCCAAGGTCTTACATAA | Novel | NAG |
| TTGCCTGAACTTTAGGCCCAT | Novel | NNNRRT |
| TTGCCTGAGTGCAGTATGGT | Novel | NAG |
| TTGCTCTGAAGGCTGGATCCA | Novel | NNNRRT |
| TTGCTGACGCAACCCCCACT | Novel | NGC |
| TTGCTGTGTTTGCTCTGAAGG | Novel | NNGRRT |
| TTGCTGTGTTTGCTCTGAAGG | Novel | NNNRRT |
| TTGCTTGCCTGAGTGCAGTA | Novel | NGG |
| TTGGAAGAGAAACCGTTATA | Novel | NAG |
| TTGGAAGATCCAGCATCTAG | Novel | NGA |
| TTGGAGGACAGGAGGTTGGT | Novel | NAG |
| TTGGAGGACAGGAGGTTGGTG | Novel | NNNRRT |
| TTGGATCCAGCCTTCAGAGC | Novel | NAA |
| TTGGCGAGAAAGTGAAAGCC | Novel | NGC |
| TTGGCTTTCAGTTATATGGA | Novel | NGA |
| TTGGGACTTCAATCCCAACA | Novel | NGG |
| TTGGGATTGAAGTCCCAATC | Novel | NGG |
| TTGGGGGAGGAGATTAGATT | Novel | NAA |
| TTGGGTATACATTTAAACCC | Novel | NAA |
| TTGGTAACAGCGGTAAAAAG | Novel | NGA |
| TTGGTGAGTGATTGGAGGTT | Novel | NGG |
| TTGGTGGTCTATAAGCTGGA | Novel | NGA |
| TTGGTGTAAATGTATATTAG | Novel | NAA |
| TTGGTTCTTCTGGACTATCA | Novel | NGG |
| TTGTAAGTTGGCGAGAAAGT | Novel | NAA |
| TTGTACTAGGAGGCTGTAGGC | Novel | NNNRRT |
| TTGTAGTATGCCCTGAGCCT | Novel | NAG |
| TTGTATGCATGTATTCAATC | Novel | NAA |
| TTGTCTCACTTTTGGAAGAG | Novel | NAA |
| TTGTCTTTGGGTATACATTT | Novel | NAA |
| TTGTGAGGATTCTTGTCAAC | Novel | NAG |
| TTGTGGCAAGGACCCATAACT | Novel | NNNRRT |
| TTGTGGGTCACCATATTCTT | Novel | NGG |
| TTGTTCATGTCCTACTGTTC | Novel | NAG |
| TTGTTGGTTCTTCTGGACTAT | Novel | NNNRRT |
| TTGTTTACACAGAAAGGCCTT | Novel | NNNRRT |
| TTTAAACCCTAACAAAACAA | Novel | NGA |
| TTTAAAGACTGGGAGGAGTT | Novel | NGG |
| TTTAAATGTATACCCAAAGA | Novel | NAA |
| TTTAATCTAATCTCCTCCCC | Novel | NAA |
| TTTACACAATGTGGTTATCC | Novel | NGC |
| TTTACACACTCTATGGAAGG | Novel | NGG |
| TTTACACAGAAAGGCCTTGT | Novel | NAG |
| TTTACACCAAGACATTATCA | Novel | NAA |
| TTTACCCCGTTGCCCGGCAA | Novel | NGG |
| TTTAGAAAACTTCCTATTAA | Novel | NAG |
| TTTATAAGGGTCGATGTCCA | Novel | NGC |
| TTTATGGGTTATGTCATTGG | Novel | NAG |
| TTTCAGTTATATGGATGATG | Novel | NGG |
| TTTCCAATCAATAGGCCTGT | Novel | NAA |
| TTTCCAATGAGGATTAAAGA | Novel | NAG |
| TTTCCACCAGCAATCCTCTG | M80 | NGA |
| TTTCCGAAAGCCCAGGATGA | Novel | NGG |
| TTTCCTTCAGTACGAGATCTT | Novel | NNNRRT |
| TTTCTCAAAGGTGGAGACAG | Novel | NGG |
| TTTCTCATTAACTGTAAGTG | Novel | NGC |
| TTTCTCCTGGCTCAGTTTAC | Novel | NAG |
| TTTCTCTTCCAAAAGTGAGA | Novel | NAA |
| TTTCTGTGTAAACAATACCT | Novel | NAA |
| TTTCTTGTCTCACTTTTGGA | Novel | NGA |
| TTTCTTGTTGACAAGAATCCT | Novel | NNNRRT |
| TTTGAAGTATGCCTCAAGGT | Novel | NGG |
| TTTGAGAAACACTCATCCTC | Novel | NGG |
| TTTGCCTTCTGACTTCTTTCC | Novel | NNNRRT |
| TTTGCTCCAGACCTGCTGCG | Novel | NGC |
| TTTGCTCGCAGCAGGTCTGG | Novel | NGC |
| TTTGCTCTGAAGGCTGGATC | Novel | NAA |
| TTTGCTGACGCAACCCCCAC | E23_whb | NGG |
| TTTGCTGCCCCATTTACACAA | Novel | NNNRRT |
| TTTGCTGTGTTTGCTCTGAA | Novel | NGC |
| TTTGGAAGAGAAACCGTTAT | Novel | NGA |
| TTTGGAAGATCCAGCATCTA | Novel | NAG |
| TTTGGAAGTAATGATTAACT | Novel | NGA |
| TTTGGTGGTCTATAAGCTGG | Novel | NGG |
| TTTGGTGTCTTTCGGAGTGT | Novel | NGA |
| TTTGTAGGCCCACTTACAGT | Novel | NAA |
| TTTGTAGTATGCCCTGAGCC | Novel | NGA |
| TTTGTATGATGTGTTCTTGT | Novel | NGC |
| TTTGTCTTTGGGTATACATT | Novel | NAA |
| TTTGTGGGTCACCATATTCT | Novel | NGG |
| TTTGTTTACGTCCCGTCGGCG | Novel | NNGRRT |
| TTTGTTTACGTCCCGTCGGCG | Novel | NNNRRT |
| TTTTATGGGTTATGTCATTG | Novel | NAA |
| TTTTCCGAAAGCCCAGGATGA | Novel | NNGRRT |
| TTTTCCGAAAGCCCAGGATGA | Novel | NNNRRT |
| TTTTCTCATTAACTGTAAGT | Novel | NGG |
| TTTTGATAATGTCTTGGTGT | Novel | NAA |
| TTTTGCTCGCAGCAGGTCTG | Novel | NAG |
| TTTTGGAAGAGAAACCGTTA | Novel | NAG |
| TTTTGTATGATGTGTTCTTG | Novel | NGG |
| TTTTTGATAATGTCTTGGTG | Novel | NAA |

### Example 5: Establishment and Validation of HBV-Infected Primary Human Hepatocyte (PHH) System

[0804] A system comprising HBV-infected primary human hepatocytes (PHHs) was established by persistent HBV infection for over 30 days in a self-assembling, primary hepatocyte co-culture system (FIG. 12A). To generate the co-cultures system, primary human hepatocytes (PHH) (BioIVT) were plated at 350 k cells per well in a Collagen-Type I coated 24-well plate (Corning, 354408), and incubated at 37° C., 5% C02 to generate an adherent cell monolayer. 4 hrs post plating, plated hepatocytes were washed with CP medium (BioIVT) to remove any unadhered cells. 3T3-J2 murine embryonic fibroblasts (Kerafast (distributed from Howard Green (Harvard), Boston) were seeded at a ratio of 95% hepatocyte:5% fibroblast per well and cultured at 37° C., 5% C02 for an additional 12 hours to form co-cultures. Culture medium was replaced every 2 days (500 μL per well) for continued maintenance. Shown in FIG. 12C are images of transduced primary hepatocytes from two human hepatocyte donors, RSE and TVR, isolated from two different human livers. They were isolated, cryopreserved, and distributed for sale for research purposes by BioIVT (Maryland, US).

[0805] On the second day, post hepatocyte co-culture formation, lentivirus was added at an MOI 500 dropwise into culture medium per well. Co-cultures were transduced for 16 hours, prior to changing media for fresh CP medium (BioIVT). Culture medium was replaced every 2 days (500 μL per well) for continued maintenance. Protein expression occurs over 7 days period in hepatic co-cultures. At day 7 post transduction, co-cultures were transfected using lipofection based reagents co-formulated with gRNA and base-editor mRNA. Cells were lysed and harvested for gDNA 48 hours post transfection. FIG. 12B provides a timeline of the in vitro transduction schedule in either hepatocyte monolayers or hepatocyte co-cultures showing representative time points. Importantly, PHH cultures not treated with polyethylene glycol (PEG) during infection tend to have very low percentages of HBV infected PHH cells.

[0806] To determine if the system recapitulates the physiological environment of primary hepatocytes, HBV-infected and uninfected cultured PHH cells were treated with interferon, which inhibits replication and reduces cccDNA, or tenofovir, which inhibits replication, but does not reduce cccDNA levels, and HBV markers were measured (FIG. 13A). The infected cells, as gauged by HBV markers, respond to treatment as expected. Referring to FIG. 13B, extracellular HBV DNA, the gold standard HBV replication marker, was significantly reduced compared to untreated HBV infected control cells by day 7 post infection. The amounts of extracellular HBV DNA detected in the treated PHH cultures were similar to the amount observed in negative control cell cultures. Additionally, the treated and control cells showed near baseline levels of extracellular HBV DNA between 5 and 13 days post-infection, but the concentration of extracellular HBV DNA in the untreated HBV-infected cell cultures increased during the entire observation period (i.e., 5-13 days post infection).

[0807] Other markers associated with HBV infection include HBV surface antigen (HBsAg), intracellular HBV DNA, total HBV RNA, and pre-genomic RNA (pgRNA). Cultures treated with interferon or tenofovir have lower levels of HBV surface antigen (HBsAg), intracellular HBV DNA, total HBV RNA, and pre-genomic RNA (pgRNA) relative to negative controls (FIGS. 13C, 13D, 13E, and 13F, respectively). These results show that the HBV markers respond to treatment as expected. It also establishes that the PHH system is physiologically relevant and useful to assess HBV replication and cccDNA activity.

### Example 6: Transfection with BE4 and gRNAs Leads to a Decrease in HBV Markers Levels in HBV Infected PHH

[0808] The efficacy of base editing the HBV genome in PHH cells using base editors and guide RNAs of the present invention was assessed using the system described above. Specifically, cells were transfected with a construct encoding a BE4 base editor (either with or without a UGI domain) and gRNAs. The M52 and M190 guide RNAs were chosen. These gRNAs direct the base editor to the pol and X gene regions, respectively, of the HBV genome and facilitate base changes that result in premature stop codons in these genes. Referring to FIG. 14, cells treated with a BE4 (having no UGI domain) and the HBV-targeting gRNAs consistently led to a significant reduction of all tested HBV marker levels, similar to what was observed with interferon treatment. The BE4 base editor without the UGI domain performs better than BE4 with the UGI domain. Without being bound by theory, omitting the UGI domain makes C->U deamination susceptible to uracil glycosylase, which damages HBV cccDNA, thus promoting its degradation.

### Example 7: Screen Based on HBsAg Levels (Surrogate Marker of cccDNA) in HBV-PHH Identifies Functional gRNAs

[0809] Lead functional guide RNAs were identified using the system described in Example 5. Candidate guide RNAs were introduced into HBV-infected PHHs along with a BE4 base editor and the level of HBsAg was determined. The HBsAg levels observed in cells treated with functional guide RNAs were lower than those observed in untreated cells (FIG. 15), with several approaching the levels observed in interferon treated cells. HBsAg levels in cells treated with functional guideRNAs that target the pre-core, pol, and X genes are shown in FIG. 15. BE4 base editors without UGI domains performed better, as evidenced by lower HBsAg levels, than BE4 base editors with UGI domains when combined with an HBV-targeting gRNA. The best gRNAs (gRNA191, targeting the X gene, and gRNA12, which targets the pol gene) were chosen based on the results of this screen. Levels of HBsAg (a surrogate marker for cccDNA) in cells treated with gRNA191 and BE4_noUGI were comparable levels of HBsAg resulting from interferon treatment.

### Example 8: Mechanistic Aspects of Base Editing Action on HBV

[0810] HBV infected PHH cells were transfected with mRNAs encoding a BE4 base editor, BE4 base editor lacking a UGI domain, a BE4 base editor lacking nickase activity (i.e., “dead”) and also lacking a UGI domain, Cas9, and a dead Cas9, each alone or in combination with gRNA 191 or 12. gRNA 191 targets the base editor to introduce a premature stop codon in the X gene, and gRNA 12 targets the base editor to a conserved region of the HBV Pol/S genes.

[0811] HBsAg and HBV extracellular DNA, markers of HBV, were significantly reduced in response to transfection with the base editors and gRNAs (FIGS. 16A and 16B). HBsAg levels are normalized to the untreated HBV infected cells (referred to as HBV). Nuclease activity was necessary for Cas9 activity, but was not required for base editing activity. Interestingly, introduction of Cas9 mRNA only reduced viral parameters without guide RNAs. Without being bound by theory, mRNA can induce a cellular immune response, which contributes to HBV inhibition. While HBV can exist episomally, it can also integrate into a host cell's genome. BE4 base editors lacking a UGI domain administered with gRNA showed comparable activity to Cas9 administered with gRNA. A base editor lacking nickase activity (e.g., dead BE4) can be advantageous as it reduces the potential for generating genomic double-stranded breaks if an abasic site is formed by the activity of uracil glycosylase on the converted C→U (see FIG. 3B). Without being bound by theory, to treat chronic Hepatitis B, a complex approach may be advantageous involving: 1) target cccDNA; 2) inhibit HBsAg synthesis (including from integrated HBV DNA); and 3) stimulate the immune system. These features can be found in the reagents used for base editing.

### Example 9: Comparison of Base Editing in HBV-Lenti-HepG2 and HBV Infected PHH

[0812] Base editing efficiencies were compared in HEPG2-NTCP Lenti-HBV and HBV-infected PHH cells. Significantly lower editing rates were observed in HBV infected PHH cells compared to HEPG2-NTCP Lenti-HBV cells (FIGS. 17A and 17B). Additionally, different patterns of gRNA efficacy were observed for the two different cell types. The HEPG2-NTCP Lenti-HBV cells showed higher base editing efficiency compared to PHH-HBV cells when using gRNA190 (FIG. 18). Interestingly, no indels or transversions were observed in the PHH-HBV cells (FIG. 18). As expected, a significant number of indel and transversions were observed in the Lenti-HBV cells edited with gRNA190 and BE4_noUGI. That there were no indels or transversions in the PHH-HBV with BE4_noUGI indicates a different fate of the edited cccDNA compared to integrated HBV DNA.

### Example 10 Primary Hepatocyte Co-Culture (PHH) Infected with HBV Virus as a Clinically Relevant System for Assessing Anti-Viral Activity of Base Editing Reagents

[0813] Experiments were performed to determine whether the base editing approach using HBV-infected primary human hepatocyte (PHH) cultures described herein was more efficient in reducing several different viral parameters compared to the activity of the known HBV antiviral drug (entecavir) and/or other controls.

[0814] The experiments employed the approach using the HBV-infected PHH culture system and transfection of the PHH with components (base editors) of the base editor system as depicted in FIG. 19. Primary hepatocytes (PHH) co-cultures were infected with HBV in order to test antiviral efficacy of the base editors. The base editing reagents or components (base editor mRNA and synthetic gRNA) were transfected via lipofection twice over the course of two weeks. The first transfection was performed 3 days after infection to allow for complete formation of viral covalently closed circular DNA (cccDNA) at the time of the transfection. Extracellular parameters (HBsAg, HBeAg, and HBV DNA) were monitored over the course of the experiment and intracellular parameters (HBV DNA, viral RNA, and editing) were monitored at the end of the experiment. Briefly, on Day 0, PHH were infected with HBV (MOI=500). On Day 3 after HBV infection, the cells were transfected with base editing components, e.g., a BE and gRNA, or control(s). On Day 10, PHHs were subjected to another round of transfection. At the termination of the experiment, e.g., Day 17 or longer, e.g., Day 25, the PHH were lysed and extracellular amounts of HBsAg, HBeAg and HBV DNA were assessed. Also assessed were intracellular amounts of HBV DNA, viral RNA and the efficacy of base editing by the components of the base editor system versus control(s). Transfection details: RNA format, 800 ng total RNA per well in a 24 well plate (600 ng base editor+200 ng gRNA) transfected via lipofection (lipofectamin messengerMax, Thermofisher Scientific) according to the vendor's protocol.

[0815] To determine which step(s) of the HBV life cycle was/were targeted using the base editing reagents described herein, four (4) different viral parameters (HBsAg, HBeAg, HBV DNA, and pregenomic RNA (pgRNA), which is generated from cccDNA, were assessed. Pregenomic RNA (pgRNA) generated from cccDNA plays an important role in viral genome amplification and replication. Hepatic pgRNA and cccDNA expression levels indicate viral persistence and replication activity in infected cells.

[0816] HBV-infected PHH were transfected with the base editors BE4 or BE4_noUGI and gRNA, i.e., gRNA12, which targets intersection of the HBV Polymerase and S genes, in a 14-day PHH co-culture experiment, (FIG. 19), which included the common HBV antiviral drug entecavir as a comparator. Entecavir inactivates viral polymerase, thereby inhibiting replication, but does not interfere with cccDNA activity. Based on its use in the art, entecavir treatment reduces HBV DNA, however, it does not influence the expression of HBsAg and pgRNA. This result indicates that the established system is clinically relevant for assessing the efficacy of HBV antiviral reagents. The findings from this experiment demonstrated that, compared to entecavir, treatment of HBV-infected PHH with BE4_noUGI and gRNA12 resulted in the reduction of all 4 of the HBV marker parameters assessed, namely, HBV DNA, HBsAg, HBeAg and pgRNA, thus indicating that base editing using the components described herein inhibited HBV replication and disrupted cccDNA activity. (FIG. 20). In particular, the base editor BE4_noUGI+gRNA provided a greater reduction of all HBV markers compared with base editor BE4_UGI and with entecavir. (FIG. 20).

### Example 11 Base Editing is Effective in Inhibiting HBV and Reducing HBV Viral Parameters Compared to a Known HBV Antiviral Drug (Entecavir)

[0817] To assess whether a combination of different gRNAs (multiplexing gRNAs) in HBV-infected PHH cultures would lead to improved HBV inhibition, a comprehensive experiment comparing single gRNAs with a combination of up to 4 gRNAs targeting different regions of HBV cccDNA was performed. The experiment was carried out for both BE4 and BE4_noUGI base editors, and the results were assessed for the 4 viral parameters (HBsAg, HBeAg, HBV total DNA, pgRNA) at the termination of the experiment. Consistent with the previous results, transfection of the PHH with individual gRNAs and BE4 resulted in a small but significant reduction of particular viral parameters; the level of inhibition was dependent on the gRNA. For all of the parameters assessed, BE+gRNA19 performed slightly better than other gRNAs that were tested. A small improvement in HBV inhibition was detected using gRNA multiplexing (gRNA19+gRNA190) and BE, and a combination of BE plus four gRNAs (190+12+40+52) comparatively performed best in inhibiting HBV (FIGS. 21, 22, 23 and 24).

[0818] Table 26 presents gRNAs and corresponding polynucleotide sequences as used in the experiments described in herein (e.g., FIGS. 21-27). In Table 26, a, c, g, u: 2′-O-methyl residues; s: phosphorothioate; A, C, G, U: RNA nucleobase residues.

TABLE 26

| | gRNA | |
|---|---|---|
| Guide | Identifier | Sequence |
| CTGCCAACTGGATCCTGCGC | M191 | 5′ csusgs CCAACUGGAUCCUGCGC GUUUUAGAGC UAGAAAUAGC |
| | (gRNA191) | AAGUUAAAAU AAGGCUAGUC CGUUAUCAAC UUGAAAAAGU GGCACCGAGU |
| | | CGGUGCUsususu-3′ |
| GCTGCCAACTGGATCCTGCG | M190 | 5′ gscsus GCCAACUGGAUCCUGCG GUUUUAGAGC UAGAAAUAGC |
| | (gRNA190) | AAGUUAAAAU AAGGCUAGUC CGUUAUCAAC UUGAAAAAGU GGCACCGAGU |
| | | CGGUGCUsususu-3′ |
| GAAAGCCCAGGATGATGGGA | M37 | 5′ gsasas AGCCCAGGAUGAUGGGA GUUUUAGAGC UAGAAAUAGC |
| | (gRNA37) | AAGUUAAAAU AAGGCUAGUC CGUUAUCAAC UUGAAAAAGU GGCACCGAGU |
| | | CGGUGCUsususu-3′ |
| TCCGCAGTATGGATCGGCAG | E19 | 5′ uscscs GCAGUAUGGAUCGGCAG GUUUUAGAGC UAGAAAUAGC |
| | (gRNA19) | AAGUUAAAAU AAGGCUAGUC CGUUAUCAAC UUGAAAAAGU GGCACCGAGU |
| | | CGGUGCUsususu-3′ |
| GACTTCTCTCAATTTTCTAG | E12 | 5′ gsascs UUCUCUCAAUUUUCUAG GUUUUAGAGC UAGAAAUAGC |
| | (gRNA12) | AAGUUAAAAU AAGGCUAGUC CGUUAUCAAC UUGAAAAAGU GGCACCGAGU |
| | | CGGUGCUsususu-3′ |
| TCAATCCCAACAAGGACACC | M52 | 5′ uscsas AUCCCAACAAGGACACC GUUUUAGAGC UAGAAAUAGC |
| | (gRNA52) | AAGUUAAAAU AAGGCUAGUC CGUUAUCAAC UUGAAAAAGU GGCACCGAGU |
| | | CGGUGCUsususu-3′ |
| TCCTCTGCCGATCCATACTG | E20 | 5′ uscscs UCUGCCGAUCCAUACUG GUUUUAGAGC UAGAAAUAGC |
| | (gRNA20) | AAGUUAAAAU AAGGCUAGUC CGUUAUCAAC UUGAAAAAGU GGCACCGAGU |
| | | CGGUGCUsususu-3′ |
| CCATGCCCCAAAGCCACCCA | M40 | 5′ cscsas TGCCCCAAAGCCACCCA GUUUUAGAGC UAGAAAUAGC AAGUUAAAAU |
| | (gRNA40) | AAGGCUAGUC CGUUAUCAAC UUGAAAAAGU GGCACCGAGU CGGUGCUsususu- |
| | | 3′ |
| TATGGATGATGTGGTATTGG | M94 | 5′ usasus GGATGATGTGGTATTGG GUUUUAGAGC UAGAAAUAGC |
| | (gRNA94) | AAGUUAAAAU AAGGCUAGUC CGUUAUCAAC UUGAAAAAGU GGCACCGAGU |
| | | CGGUGCUsususu-3′ |

[0819] FIG. 22 shows the results of Next Generation Sequencing (NGS) performed on total DNA purified from HBV infected PHH and on the same samples enriched for cccDNA through ExoI/ExoIII digestion. FIG. 22 shows the results of base editing using BE4 at particular HBV target sites using different conditions (either individual gRNAs or a combination of gRNAs). Significantly increased base editing (increased % Editing) was observed for HBV cccDNA-enriched samples, which indicated successful cccDNA editing. The finding of a lower % Editing in total DNA (genomic plus viral DNA) purified from HBV-PHH is indicative of an inability of the edited cccDNA to propagate into a replication-competent viral particle.

[0820] Transfection with the base editor BE4_noUGI and different gRNAs resulted in greater inhibition of the four viral parameters compared to BE4 (i.e., BE4-UGI), a result which was consistent with the previous experiments. (FIG. 23). gRNA19 was found to perform best in inhibiting HBV compared with the 4 gRNAs (gRNA12, gRNA19, gRNA191, and gRNA40) tested in the experiment. Transfection with BE4_noUGI and gRNA19 resulted in a robust antiviral response and resulted in a reduction of all tested viral parameters (HBsAg, HBeAg, pgRNA, and HBV total DNA). No improvement in antiviral efficacy was detected using BE4_noUGI with gRNA multiplexing. Transfection with BE4_noUGI and gRNA19 resulted in the same levels of reduction of viral parameters compared to those using BE4_noUGI with a combination of gRNAs. (FIG. 23).

[0821] NGS sequencing was also performed on the total DNA purified from HBV infected PHH and on the same samples enriched for cccDNA through ExoI/ExoIII digestion. FIG. 24 shows base editing using BE4_noUGI on particular HBV target sites for different conditions (individual or combination of gRNAs). Significantly increased base editing (increased % Editing) was observed for HBV cccDNA-enriched samples, which indicated successful cccDNA editing. The finding of a lower % Editing in total DNA (genomic plus viral DNA) purified from HBV-PHH is indicative of an inability of the edited cccDNA to propagate into a replication-competent viral particle. (FIG. 24).

### Example 12 A Base Editor without Nickase Activity is Effective in Reducing HBV Parameters of Infection

[0822] The base editor BE4_noUGI possesses a nickase activity that may lead to a double stranded break (dsbreaks) in the targeted DNA site (Komor A C et al., 2016). Double stranded breaks in cccDNA can further lead to integration of the HBV DNA into the human genome, which should be avoided. In order to minimize the possibility of generating dsbreaks during the base editing process, mutated BE4_noUGI (H840A), i.e., dBE4_noUGI, which does not have a nickase activity and only possesses deaminase activity, was generated and assessed. The base editing activity of dBE4_noUGI was evaluated in conjunction with gRNA12 (Pol/S) using HBV-infected PHH in a long-term (25-day) experiment. While transfection of base editor alone (no gRNA) did not lead to a significant reduction in the assessed viral parameters, transfection of the dBE4_noUGI and gRNA12 led to a robust HBV inhibition, as determined by measuring the levels of the viral parameters HBsAg, HBV DNA, and HBeAg. (FIGS. 25A-25C).

[0823] In addition, the antiviral activity of interferon, which is known for use in treating HBV, was compared with the base editing activity of the base editor dBE4_noUGI and gRNA in inhibiting HBV in a long-term experiment using HBV-infected PHH. While interferon can effectively treat HBV in some patients, this agent is also known to be toxic and can cause a number of adverse side-effects. The result of the experiment demonstrated that both interferon and base editing using dBE4_noUGI+gRNA12 decreased the HBV viral parameters to comparable levels. (FIGS. 25A-25C). Cell viability and metabolic activity were also evaluated by testing levels of albumin secreted into the cell medium at the end of the experiment. Interferon treatment led to a significant reduction of secreted albumin, which is indicative of the toxicity of interferon treatment. In contrast to interferon treatment, base editing by the dBE4_noUGI and gRNA (e.g., gRNA12) caused minimal reduction of secreted albumin levels, thus indicating a lack of toxicity associated with the use of the base editing approach. (FIG. 25D).

### Example 13 Base Editing Reduces Viral Parameters for HBV of Genotypes D and C in HBV-Infected PHH (Long-Term Experiment)

[0824] Experiments were conducted to determine whether the base editing approach resulted in similar anti-viral efficacy for HBV of different genotypes. Accordingly, dBE4_noUGI and gRNA12 (targeting the intersection of HBV polymerase and S gene (P/S)) were assessed in HBV-infected PHH co-cultures in parallel experiments in which the PHH were infected with either with HBV of genotype D (Gen.D) or HBV of genotype C (Gen.C). Infection of PHH with HBV of genotype C (no treatment condition) resulted in a higher viral load at the termination of the experiment. Despite the higher levels of the viral parameters assessed in the experiments, transfection with the base editor dBE4_no UGI and gRNA12 showed robust HBV inhibition of both HBV Gen.D and HBV Gen.C compared to the controls. (FIGS. 26A-26C). The results support the use of base editing and the base editor systems described herein for the treatment of infection caused by HBV of different genotypes.

### Example 14 Transfection with ABE7.10 and HBV-Specific gRNA Targeting the HBV Polymerase Active Site Reduces HBV Markers in HBV-Infected PHH

[0825] Adenine base editors (ABEs) possess robust base editing activity, while showing minimal off-target effects. (Gaudelli, N. M., et al., “Programmable base editing of A·T to G·C in genomic DNA without DNA cleavage” Nature 551, 464-471 (2017). While endogenous cytidine deaminases have been reported to deaminate cccDNA, no such mechanism or activity has been shown for adenine deaminases. To determine whether HBV editing with ABE resulted in inhibiting virus replication in HBV-infected primary hepatocytes, the adenine deaminase-containing base editor ABE7.10, as described herein, was assessed in conjunction with a gRNA in experiments involving the use of the HBV-infected PHH co-culture system. Accordingly, HBV-infected PHH cultures were transfected with ABE7.10 mRNA and gRNA94, which was designed to introduce a silent mutation in the HBV polymerase active site, as described in Example 10 supra and FIG. 19. An analysis of the experimental results showed that robust reductions of the viral parameters HBsAg, HBeAg, pgRNA, and HBV total DNA were detected with the use of the base editor ABE7.10 mRNA and gRNA94 (targeting the HBV polymerase active site), in combination, compared with ABE7.10 mRNA used alone, which did not cause a decrease in the viral parameters (FIG. 27A). Next Generation Sequencing (NGS) was performed on the total DNA purified from HBV-infected PHH and on the same samples enriched for cccDNA through ExoI/ExoIII digestion. Approximately 50% base editing by ABE7.10 mRNA and gRNA94 was detected in cccDNA-enriched samples, which indicated successful cccDNA editing. An absence of base editing in total DNA purified from HBV-PHH is indicative of the inability of the edited cccDNA to propagate into a replication competent viral particle. (FIG. 27B). These data in combination demonstrate that ABEs serve as efficient antiviral reagents for reducing HBV viral load.

### OTHER EMBODIMENTS

[0826] From the foregoing description, it will be apparent that variations and modifications may be made to the invention described herein to adopt it to various usages and conditions. Such embodiments are also within the scope of the following claims.

[0827] The recitation of a listing of elements in any definition of a variable herein includes definitions of that variable as any single element or combination (or subcombination) of listed elements. The recitation of an embodiment herein includes that embodiment as any single embodiment or in combination with any other embodiments or portions thereof.

[0828] All patents and publications mentioned in this specification are herein incorporated by reference to the same extent as if each independent patent and publication was specifically and individually indicated to be incorporated by reference.

1. A method of editing a nucleobase of a hepatitis B virus (HBV) genome, the method comprising contacting the HBV genome with one or more guide RNAs and a base editor comprising a polynucleotide programmable DNA binding domain and an adenosine deaminase or cytidine deaminase domain, wherein said guide RNA targets said base editor to effect an alteration of the nucleobase of the HBV genome.

2. The method of claim 1, wherein the nucleobase is in a polynucleotide encoding an HBV protein.

3. The method of claim 1, wherein the contacting is in a eukaryotic cell, a mammalian cell, or a human cell.

4. The method of claim 1, wherein the cell is in vivo or ex vivo.

5. The method of claim 1, wherein the cytidine deaminase converts a target C to U in the HBV genome.

6. The method of claim 1, wherein the cytidine deaminase converts a target C·G to T·A in the polynucleotide encoding the HBV protein.

7. The method of claim 1, wherein the adenosine deaminase converts a target A·T to G·C in the polynucleotide encoding the HBV protein.

8. The method of claim 2, wherein alteration of the nucleobase in the polynucleotide encoding the HBV protein results in a premature termination codon.

9. The method of claim 8, wherein the alteration of the nucleobase results in an R87* or W120* termination in an HBV X protein.

10. The method of claim 8, wherein the alteration of the nucleobase results in an W35* or W36* in an HBV S protein.

11. The method of claim 2, wherein the alteration of the HBV polynucleotide is a missense mutation.

12. The method of claim 11, wherein the missense mutation is in an HBV pol gene.

13. The method of claim 12, wherein the missense mutation results in an E24G, L25F, P26F, R27C, V48A, V48I, S382F, V378I, V378A, V379I, V379A, L377F, D380G, D380N, F381P, R376G, A422T, F423P, A432V, M433V, P434S, D540G, A688V, D689G, A717T, E718K, P713S, P713L, or L719P in an HBV polymerase protein encoded by the HBV pol gene.

14. The method of claim 11, wherein the missense mutation is in an HBV core gene.

15. The method of claim 14, wherein the missense mutation results in a T160A, T160A, P161F, S162L, C183R, or *184Q in an HBV core protein encoded by the HBV core gene.

16. The method of claim 11, wherein the missense mutation is in an HBV X gene.

17. The method of claim 16, wherein the missense mutation results in a H86R, W120R, E122K, E121K, or L141P in an HBV X protein encoded by the HBV X gene.

18. The method of claim 11, wherein the missense mutation is in an HBV S gene.

19. The method of claim 18, wherein the missense mutation results in a S38F, L39F, W35R, W36R, T37I, T37A, R78Q, S34L, F80P, or D33G in an HBV S protein encoded by the HBV S gene.

20-23. (canceled)

24. The method of claim 1, wherein the polynucleotide programmable DNA binding domain is a nuclease inactive or nickase variant.

25-38. (canceled)

39. A method of treating hepatitis B virus (HBV) infection in a subject, comprising administering to a subject in need thereof one or more polynucleotides encoding a polynucleotide programmable DNA binding domain and a base editor domain that is an adenosine deaminase or a cytidine deaminase domain, and one or more guide polynucleotides that target the base editor domain to effect an A·T to G·C, C·G to T·A, or C·G to U·A alteration of the nucleic acid sequence encoding an HBV polypeptide.

40-77. (canceled)

78. A composition comprising a base editor bound to a guide RNA, wherein the guide RNA comprises a nucleic acid sequence that is complementary to an HBV gene.

79-96. (canceled)

97. A pharmaceutical composition for the treatment of HBV infection comprising
(i) a base editor, or a nucleic acid encoding the base editor, and one or more guide RNAs (gRNA) comprising a nucleic acid sequence complementary to an HBV gene in a pharmaceutically acceptable excipient.

98-105. (canceled)

106. A method of treating HBV infection, the method comprising administering to a subject in need thereof the pharmaceutical composition of claim 97.

107. (canceled)

108. An HBV genome comprising an alteration selected from the group consisting of:
a premature termination codon introducing a R87STOP or W120STOP in the X gene;
a premature termination codon introducing a W35STOP or W36STOP in the S gene;
a missense mutation in the HBV pol gene that introduces a E24G, L25F, P26F, R27C, V48A, V48I, S382F, V378I, V378A, V379I, V379A, L377F, D380G, D380N, F381P, R376G, A422T, F423P, A432V, M433V, P434S, D540G, A688V, D689G, A717T, E718K, P713S, P713L, or L719P in HBV polymerase;
a missense mutation is in the HBV core gene that introduces a T160A, T160A, P161F, S162L, C183R, or STOP184Q in the HBV Core polypeptide;
a missense mutation is in the X gene that introduces a H86R, W120R, E122K, E121K, or L141P in the HBV X polypeptide; and
a missense mutation in the S gene that introduces a S38F, L39F, W35R, W36R, T37I, T37A, R78Q, S34L, F80P, or D33G in the HBV S polypeptide.

109-115. (canceled)

116. A guide RNA comprising a nucleic acid sequence that is complementary to an HBV gene.

117-122. (canceled)

123. The guide RNA of claim 116 comprising a nucleic acid selected from the group consisting of, from 5′ to 3′, UCAAUCCCAACAAGGACACC; GGGAACAAGAUCUACAGCAU; AAGCCCAGGAUGAUGGGAUG; CUGCCAACUGGAUCCUGCGC; GACACAUCCAGCGAUAACCA; GCUGCCAACUGGAUCCUGCG; UAUGGAUGAUGUGGUAUUGG; CCAUGCCCCAAAGCCACCCA; AAGCCACCCAAGGCACAGCU; GAGAAGUCCACCACGAGUCU; CUUCUCUCAAUUUUCUAGGG; GACGACGAGGCAGGUCCCCU; CCCAACAAGGACACCUGGCC; UGCCAACUGGAUCCUGCGCG; AGGAGUUCCGCAGUAUGGAU; CCGCAGUAUGGAUCGGCAGA; CCUCUGCCGAUCCAUACUGC; CGCCCACCGAAUGUUGCCCA; GACUUCUCUCAAUUUUCUAG; GUUCCGCAGUAUGGAUCGGC; UACUAACAUUGAGGUUCCCG; UCCGCAGUAUGGAUCGGCAG; UCCUCUGCCGAUCCAUACUG; GUAGCUCCAAAUUCUUUAUA; and AAUCCACACUCCGAAAGACA.

124. A pharmaceutical composition comprising (i) a nucleic acid encoding a base editor; and (ii) the guide RNA of claim 116.

125. (canceled)

The application's sequence listing, which the Patent Office published only in electronic form, follows.

SEQUENCE LISTING (2799 sequences)

SEQ ID NO: 1 - RNA, 20 nt, Artificial Sequence
  Description of Artificial Sequence: Synthetic oligonucleotide
ucaaucccaacaaggacacc

SEQ ID NO: 2 - RNA, 20 nt, Artificial Sequence
  Description of Artificial Sequence: Synthetic oligonucleotide
gggaacaagaucuacagcau

SEQ ID NO: 3 - RNA, 20 nt, Artificial Sequence
  Description of Artificial Sequence: Synthetic oligonucleotide
aagcccaggaugaugggaug

SEQ ID NO: 4 - RNA, 20 nt, Artificial Sequence
  Description of Artificial Sequence: Synthetic oligonucleotide
cugccaacuggauccugcgc

SEQ ID NO: 5 - RNA, 20 nt, Artificial Sequence
  Description of Artificial Sequence: Synthetic oligonucleotide
gacacauccagcgauaacca

SEQ ID NO: 6 - RNA, 20 nt, Artificial Sequence
  Description of Artificial Sequence: Synthetic oligonucleotide
gcugccaacuggauccugcg

SEQ ID NO: 7 - RNA, 20 nt, Artificial Sequence
  Description of Artificial Sequence: Synthetic oligonucleotide
uauggaugaugugguauugg

SEQ ID NO: 8 - RNA, 20 nt, Artificial Sequence
  Description of Artificial Sequence: Synthetic oligonucleotide
ccaugccccaaagccaccca

SEQ ID NO: 9 - RNA, 20 nt, Artificial Sequence
  Description of Artificial Sequence: Synthetic oligonucleotide
aagccacccaaggcacagcu

SEQ ID NO: 10 - RNA, 20 nt, Artificial Sequence
  Description of Artificial Sequence: Synthetic oligonucleotide
gagaaguccaccacgagucu

SEQ ID NO: 11 - RNA, 20 nt, Artificial Sequence
  Description of Artificial Sequence: Synthetic oligonucleotide
cuucucucaauuuucuaggg

SEQ ID NO: 12 - RNA, 20 nt, Artificial Sequence
  Description of Artificial Sequence: Synthetic oligonucleotide
gacgacgaggcagguccccu

SEQ ID NO: 13 - RNA, 20 nt, Artificial Sequence
  Description of Artificial Sequence: Synthetic oligonucleotide
cccaacaaggacaccuggcc

SEQ ID NO: 14 - RNA, 20 nt, Artificial Sequence
  Description of Artificial Sequence: Synthetic oligonucleotide
ugccaacuggauccugcgcg

SEQ ID NO: 15 - RNA, 20 nt, Artificial Sequence
  Description of Artificial Sequence: Synthetic oligonucleotide
aggaguuccgcaguauggau

SEQ ID NO: 16 - RNA, 20 nt, Artificial Sequence
  Description of Artificial Sequence: Synthetic oligonucleotide
ccgcaguauggaucggcaga

SEQ ID NO: 17 - RNA, 20 nt, Artificial Sequence
  Description of Artificial Sequence: Synthetic oligonucleotide
ccucugccgauccauacugc

SEQ ID NO: 18 - RNA, 20 nt, Artificial Sequence
  Description of Artificial Sequence: Synthetic oligonucleotide
cgcccaccgaauguugccca

SEQ ID NO: 19 - RNA, 20 nt, Artificial Sequence
  Description of Artificial Sequence: Synthetic oligonucleotide
gacuucucucaauuuucuag

SEQ ID NO: 20 - RNA, 20 nt, Artificial Sequence
  Description of Artificial Sequence: Synthetic oligonucleotide
guuccgcaguauggaucggc

SEQ ID NO: 21 - RNA, 20 nt, Artificial Sequence
  Description of Artificial Sequence: Synthetic oligonucleotide
uacuaacauugagguucccg

SEQ ID NO: 22 - RNA, 20 nt, Artificial Sequence
  Description of Artificial Sequence: Synthetic oligonucleotide
uccgcaguauggaucggcag

SEQ ID NO: 23 - RNA, 20 nt, Artificial Sequence
  Description of Artificial Sequence: Synthetic oligonucleotide
uccucugccgauccauacug

SEQ ID NO: 24 - RNA, 20 nt, Artificial Sequence
  Description of Artificial Sequence: Synthetic oligonucleotide
guagcuccaaauucuuuaua

SEQ ID NO: 25 - RNA, 20 nt, Artificial Sequence
  Description of Artificial Sequence: Synthetic oligonucleotide
aauccacacuccgaaagaca

SEQ ID NO: 26 - protein, 1651 aa, Artificial Sequence
  Description of Artificial Sequence: Synthetic polypeptide
MSSETGPVAVDPTLRRRIEPHEFEVFFDPRELRKETCLLYEINWGGRHSIWRHTSQNTNKHVEVNFIEKFTTERYFCPNTRCSITWFLSWSPCGECSRAITEFLSRYPHVTLFIYIARLYHHADPRNRQGLRDLISSGVTIQIMTEQESGYCWRNFVNYSPSNEAHWPRYPHLWVRLYVLELYCIILGLPPCLNILRRKQPQLTFFTIALQSCHYQRLPPHILWATGLKSGGSSGGSSGSETPGTSESATPESSGGSSGGSDKKYSIGLAIGTNSVGWAVITDEYKVPSKKFKVLGNTDRHSIKKNLIGALLFDSGETAEATRLKRTARRRYTRRKNRICYLQEIFSNEMAKVDDSFFHRLEESFLVEEDKKHERHPIFGNIVDEVAYHEKYPTIYHLRKKLVDSTDKADLRLIYLALAHMIKFRGHFLIEGDLNPDNSDVDKLFIQLVQTYNQLFEENPINASGVDAKAILSARLSKSRRLENLIAQLPGEKKNGLFGNLIALSLGLTPNFKSNFDLAEDAKLQLSKDTYDDDLDNLLAQIGDQYADLFLAAKNLSDAILLSDILRVNTEITKAPLSASMIKRYDEHHQDLTLLKALVRQQLPEKYKEIFFDQSKNGYAGYIDGGASQEEFYKFIKPILEKMDGTEELLVKLNREDLLRKQRTFDNGSIPHQIHLGELHAILRRQEDFYPFLKDNREKIEKILTFRIPYYVGPLARGNSRFAWMTRKSEETITPWNFEEVVDKGASAQSFIERMTNFDKNLPNEKVLPKHSLLYEYFTVYNELTKVKYVTEGMRKPAFLSGEQKKAIVDLLFKTNRKVTVKQLKEDYFKKIECFDSVEISGVEDRFNASLGTYHDLLKIIKDKDFLDNEENEDILEDIVLTLTLFEDREMIEERLKTYAHLFDDKVMKQLKRRRYTGWGRLSRKLINGIRDKQSGKTILDFLKSDGFANRNFMQLIHDDSLTFKEDIQKAQVSGQGDSLHEHIANLAGSPAIKKGILQTVKVVDELVKVMGRHKPENIVIEMARENQTTQKGQKNSRERMKRIEEGIKELGSQILKEHPVENTQLQNEKLYLYYLQNGRDMYVDQELDINRLSDYDVDAIVPQSFLKDDSIDNKVLTRSDKNRGKSDNVPSEEVVKKMKNYWRQLLNAKLITQRKFDNLTKAERGGLSELDKAGFIKRQLVETRQITKHVAQILDSRMNTKYDENDKLIREVKVITLKSKLVSDFRKDFQFYKVREINNYHHAHDAYLNAVVGTALIKKYPKLESEFVYGDYKVYDVRKMIAKSEQEIGKATAKYFFYSNIMNFFKTEITLANGEIRKRPLIETNGETGEIVWDKGRDFATVRKVLSMPQVNIVKKTEVQTGGFSKESILPKRNSDKLIARKKDWDPKKYGGFDSPTVAYSVLVVAKVEKGKSKKLKSVKELLGITIMERSSFEKNPIDFLEAKGYKEVKKDLIIKLPKYSLFELENGRKRMLASAGELQKGNELALPSKYVNFLYLASHYEKLKGSPEDNEQKQLFVEQHKHYLDEIIEQISEFSKRVILADANLDKVLSAYNKHRDKPIREQAENIIHLFTLTNLGAPAAFKYFDTTIDRKRYTSTKEVLDATLIHQSITGLYETRIDLSQLGGDSGGSKRTADGSEFESPKKKRKVE

SEQ ID NO: 27 - protein, 1651 aa, Artificial Sequence
  Description of Artificial Sequence: Synthetic polypeptide
MSSETGPVAVDPTLRRRIEPHEFEVFFDPRELRKETCLLYEINWGGRHSIWRHTSQNTNKHVEVNFIEKFTTERYFCPNTRCSITWFLSWSPCGECSRAITEFLSRYPHVTLFIYIARLYHHADPRNRQGLRDLISSGVTIQIMTEQESGYCWRNFVNYSPSNEAHWPRYPHLWVRLYVLELYCIILGLPPCLNILRRKQPQLTFFTIALQSCHYQRLPPHILWATGLKSGGSSGGSSGSETPGTSESATPESSGGSSGGSDKKYSIGLAIGTNSVGWAVITDEYKVPSKKFKVLGNTDRHSIKKNLIGALLFDSGETAEATRLKRTARRRYTRRKNRICYLQEIFSNEMAKVDDSFFHRLEESFLVEEDKKHERHPIFGNIVDEVAYHEKYPTIYHLRKKLVDSTDKADLRLIYLALAHMIKFRGHFLIEGDLNPDNSDVDKLFIQLVQTYNQLFEENPINASGVDAKAILSARLSKSRRLENLIAQLPGEKKNGLFGNLIALSLGLTPNFKSNFDLAEDAKLQLSKDTYDDDLDNLLAQIGDQYADLFLAAKNLSDAILLSDILRVNTEITKAPLSASMIKRYDEHHQDLTLLKALVRQQLPEKYKEIFFDQSKNGYAGYIDGGASQEEFYKFIKPILEKMDGTEELLVKLNREDLLRKQRTFDNGSIPHQIHLGELHAILRRQEDFYPFLKDNREKIEKILTFRIPYYVGPLARGNSRFAWMTRKSEETITPWNFEEVVDKGASAQSFIERMTNFDKNLPNEKVLPKHSLLYEYFTVYNELTKVKYVTEGMRKPAFLSGEQKKAIVDLLFKTNRKVTVKQLKEDYFKKIECFDSVEISGVEDRFNASLGTYHDLLKIIKDKDFLDNEENEDILEDIVLTLTLFEDREMIEERLKTYAHLFDDKVMKQLKRRRYTGWGRLSRKLINGIRDKQSGKTILDFLKSDGFANRNFMQLIHDDSLTFKEDIQKAQVSGQGDSLHEHIANLAGSPAIKKGILQTVKVVDELVKVMGRHKPENIVIEMARENQTTQKGQKNSRERMKRIEEGIKELGSQILKEHPVENTQLQNEKLYLYYLQNGRDMYVDQELDINRLSDYDVDHIVPQSFLKDDSIDNKVLTRSDKNRGKSDNVPSEEVVKKMKNYWRQLLNAKLITQRKFDNLTKAERGGLSELDKAGFIKRQLVETRQITKHVAQILDSRMNTKYDENDKLIREVKVITLKSKLVSDFRKDFQFYKVREINNYHHAHDAYLNAVVGTALIKKYPKLESEFVYGDYKVYDVRKMIAKSEQEIGKATAKYFFYSNIMNFFKTEITLANGEIRKRPLIETNGETGEIVWDKGRDFATVRKVLSMPQVNIVKKTEVQTGGFSKESILPKRNSDKLIARKKDWDPKKYGGFDSPTVAYSVLVVAKVEKGKSKKLKSVKELLGITIMERSSFEKNPIDFLEAKGYKEVKKDLIIKLPKYSLFELENGRKRMLASAGELQKGNELALPSKYVNFLYLASHYEKLKGSPEDNEQKQLFVEQHKHYLDEIIEQISEFSKRVILADANLDKVLSAYNKHRDKPIREQAENIIHLFTLTNLGAPAAFKYFDTTIDRKRYTSTKEVLDATLIHQSITGLYETRIDLSQLGGDSGGSKRTADGSEFESPKKKRKVE

SEQ ID NO: 28 - protein, 167 aa, Unknown
  Description of Unknown: TadA sequence
MSEVEFSHEYWMRHALTLAKRAWDEREVPVGAVLVHNNRVIGEGWNRPIGRHDPTAHAEIMALRQGGLVMQNYRLIDATLYVTLEPCVMCAGAMIHSRIGRVVFGARDAKTGAAGSLMDVLHHPGMNHRVEITEGILADECAALLSDFFRMRRQEIKAQKKAQSSTD

SEQ ID NO: 29 - protein, 167 aa, Artificial Sequence
  Description of Artificial Sequence: Synthetic polypeptide
MSEVEFSHEYWMRHALTLAKRARDEREVPVGAVLVLNNRVIGEGWNRAIGLHDPTAHAEIMALRQGGLVMQNYRLIDATLYVTFEPCVMCAGAMIHSRIGRVVFGVRNAKTGAAGSLMDVLHYPGMNHRVEITEGILADECAALLCYFFRMPRQVFNAQKKAQSSTD

SEQ ID NO: 30 - protein, 167 aa, Artificial Sequence
  Description of Artificial Sequence: Synthetic polypeptide
MSEVEFSHEYWMRHALTLAKRARDEREVPVGAVLVLNNRVIGEGWNRAIGLHDPTAHAEIMALRQGGLVMQNYRLIDATLYVTFEPCVMCAGAMIHSRIGRVVFGVRNAKTGAAGSLMDVLHYPGMNHRVEITEGILADECAALLCTFFRMPRQVFNAQKKAQSSTD

SEQ ID NO: 31 - protein, 160 aa, Staphylococcus aureus
MGSHMTNDIYFMTLAIEEAKKAAQLGEVPIGAIITKDDEVIARAHNLRETLQQPTAHAEHIAIERAAKVLGSWRLEGCTLYVTLEPCVMCAGTIVMSRIPRVVYGADDPKGGCSGSLMNLLQQSNFNHRAIVDKGVLKEACSTLLTTFFKNLRANKKSTN

SEQ ID NO: 32 - protein, 161 aa, Bacillus subtilis
MTQDELYMKEAIKEAKKAEEKGEVPIGAVLVINGEIIARAHNLRETEQRSIAHAEMLVIDEACKALGTWRLEGATLYVTLEPCPMCAGAVVLSRVEKVVFGAFDPKGGCSGTLMNLLQEERFNHQAEVVSGVLEEECGGMLSAFFRELRKKKKAARKNLSE

SEQ ID NO: 33 - protein, 183 aa, Salmonella typhimurium
MPPAFITGVTSLSDVELDHEYWMRHALTLAKRAWDEREVPVGAVLVHNHRVIGEGWNRPIGRHDPTAHAEIMALRQGGLVLQNYRLLDTTLYVTLEPCVMCAGAMVHSRIGRVVFGARDAKTGAAGSLIDVLHHPGMNHRVEIIEGVLRDECATLLSDFFRMRRQEIKALKKADRAEGAGPAV

SEQ ID NO: 34 - protein, 164 aa, Shewanella putrefaciens
MDEYWMQVAMQMAEKAEAAGEVPVGAVLVKDGQQIATGYNLSISQHDPTAHAEILCLRSAGKKLENYRLLDATLYITLEPCAMCAGAMVHSRIARVVYGARDEKTGAAGTVVNLLQHPAFNHQVEVTSGVLAEACSAQLSRFFKRRRDEKKALKLAQRAQQGIE

SEQ ID NO: 35 - protein, 173 aa, Haemophilus influenzae
MDAAKVRSEFDEKMMRYALELADKAEALGEIPVGAVLVDDARNIIGEGWNLSIVQSDPTAHAEIIALRNGAKNIQNYRLLNSTLYVTLEPCTMCAGAILHSRIKRLVFGASDYKTGAIGSRFHFFDDYKMNHTLEITSGVLAEECSQKLSTFFQKRREEKKIEKALLKSLSDK

SEQ ID NO: 36 - protein, 161 aa, Caulobacter crescentus
MRTDESEDQDHRMMRLALDAARAAAEAGETPVGAVILDPSTGEVIATAGNGPIAAHDPTAHAEIAAMRAAAAKLGNYRLTDLTLVVTLEPCAMCAGAISHARIGRVVFGADDPKGGAVVHGPKFFAQPTCHWRPEVTGGVLADESADLLRGFFRARRKAKI

SEQ ID NO: 37 - protein, 179 aa, Geobacter sulfurreducens
MSSLKKTPIRDDAYWMGKAIREAAKAAARDEVPIGAVIVRDGAVIGRGHNLREGSNDPSAHAEMIAIRQAARRSANWRLTGATLYVTLEPCLMCMGAIILARLERVVFGCYDPKGGAAGSLYDLSADPRLNHQVRLSPGVCQEECGTMLSDFFRDLRRRKKAKATPALFIDERKVPPEP

SEQ ID NO: 38 - protein, 1410 aa, Artificial Sequence
  Description of Artificial Sequence: Synthetic polypeptide
EIGKATAKYFFYSNIMNFFKTEITLANGEIRKRPLIETNGETGEIVWDKGRDFATVRKVLSMPQVNIVKKTEVQTGGFSKESILPKRNSDKLIARKKDWDPKKYGGFMQPTVAYSVLVVAKVEKGKSKKLKSVKELLGITIMERSSFEKNPIDFLEAKGYKEVKKDLIIKLPKYSLFELENGRKRMLASAKFLQKGNELALPSKYVNFLYLASHYEKLKGSPEDNEQKQLFVEQHKHYLDEIIEQISEFSKRVILADANLDKVLSAYNKHRDKPIREQAENIIHLFTLTNLGAPRAFKYFDTTIARKEYRSTKEVLDATLIHQSITGLYETRIDLSQLGGDGGSGGSGGSGGSGGSGGSGGMDKKYSIGLAIGTNSVGWAVITDEYKVPSKKFKVLGNTDRHSIKKNLIGALLFDSGETAEATRLKRTARRRYTRRKNRICYLQEIFSNEMAKVDDSFFHRLEESFLVEEDKKHERHPIFGNIVDEVAYHEKYPTIYHLRKKLVDSTDKADLRLIYLALAHMIKFRGHFLIEGDLNPDNSDVDKLFIQLVQTYNQLFEENPINASGVDAKAILSARLSKSRRLENLIAQLPGEKKNGLFGNLIALSLGLTPNFKSNFDLAEDAKLQLSKDTYDDDLDNLLAQIGDQYADLFLAAKNLSDAILLSDILRVNTEITKAPLSASMIKRYDEHHQDLTLLKALVRQQLPEKYKEIFFDQSKNGYAGYIDGGASQEEFYKFIKPILEKMDGTEELLVKLNREDLLRKQRTFDNGSIPHQIHLGELHAILRRQEDFYPFLKDNREKIEKILTFRIPYYVGPLARGNSRFAWMTRKSEETITPWNFEEVVDKGASAQSFIERMTNFDKNLPNEKVLPKHSLLYEYFTVYNELTKVKYVTEGMRKPAFLSGEQKKAIVDLLFKTNRKVTVKQLKEDYFKKIECFDSVEISGVEDRFNASLGTYHDLLKIIKDKDFLDNEENEDILEDIVLTLTLFEDREMIEERLKTYAHLFDDKVMKQLKRRRYTGWGRLSRKLINGIRDKQSGKTILDFLKSDGFANRNFMQLIHDDSLTFKEDIQKAQVSGQGDSLHEHIANLAGSPAIKKGILQTVKVVDELVKVMGRHKPENIVIEMARENQTTQKGQKNSRERMKRIEEGIKELGSQILKEHPVENTQLQNEKLYLYYLQNGRDMYVDQELDINRLSDYDVDHIVPQSFLKDDSIDNKVLTRSDKNRGKSDNVPSEEVVKKMKNYWRQLLNAKLITQRKFDNLTKAERGGLSELDKAGFIKRQLVETRQITKHVAQILDSRMNTKYDENDKLIREVKVITLKSKLVSDFRKDFQFYKVREINNYHHAHDAYLNAVVGTALIKKYPKLESEFVYGDYKVYDVRKMIAKSEQEGADKRTADGSEFESPKKKRKV

SEQ ID NO: 39 - DNA, 8811 bp, Artificial Sequence
  Description of Artificial Sequence: Synthetic polynucleotide
atatgccaagtacgccccctattgacgtcaatgacggtaaatggcccgcctggcattatgcccagtacatgaccttatgggactttcctacttggcagtacatctacgtattagtcatcgctattaccatggtgatgcggttttggcagtacatcaatgggcgtggatagcggtttgactcacggggatttccaagtctccaccccattgacgtcaatgggagtttgttttggcaccaaaatcaacgggactttccaaaatgtcgtaacaactccgccccattgacgcaaatgggcggtaggcgtgtacggtgggaggtctatataagcagagctggtttagtgaaccgtcagatccgctagagatccgcggccgctaatacgactcactatagggagagccgccaccatgaaacggacagccgacggaagcgagttcgagtcaccaaagaagaagcggaaagtctctgaagtcgagtttagccacgagtattggatgaggcacgcactgaccctggcaaagcgagcatgggatgaaagagaagtccccgtgggcgccgtgctggtgcacaacaatagagtgatcggagagggatggaacaggccaatcggccgccacgaccctaccgcacacgcagagatcatggcactgaggcagggaggcctggtcatgcagaattaccgcctgatcgatgccaccctgtatgtgacactggagccatgcgtgatgtgcgcaggagcaatgatccacagcaggatcggaagagtggtgttcggagcacgggacgccaagaccggcgcagcaggctccctgatggatgtgctgcaccaccccggcatgaaccaccgggtggagatcacagagggaatcctggcagacgagtgcgccgccctgctgagcgatttctttagaatgcggagacaggagatcaaggcccagaagaaggcacagagctccaccgactctggaggatctagcggaggatcctctggaagcgagacaccaggcacaagcgagtccgccacaccagagagctccggcggctcctccggaggatcctctgaggtggagttttcccacgagtactggatgagacatgccctgaccctggccaagagggcacgcgatgagagggaggtgcctgtgggagccgtgctggtgctgaacaatagagtgatcggcgagggctggaacagagccatcggcctgcacgacccaacagcccatgccgaaattatggccctgagacagggcggcctggtcatgcagaactacagactgattgacgccaccctgtacgtgacattcgagccttgcgtgatgtgcgccggcgccatgatccactctaggatcggccgcgtggtgtttggcgtgaggaacgcaaaaaccggcgccgcaggctccctgatggacgtgctgcactaccccggcatgaatcaccgcgtcgaaattaccgagggaatcctggcagatgaatgtgccgccctgctgtgctatttctttcggatgcctagacaggtgttcaatgctcagaagaaggcccagagctccaccgactccggaggatctagcggaggctcctctggctctgagacacctggcacaagcgagagcgcaacacctgaaagcagcgggggcagcagcggggggtcagacaagaagtacagcatcggcctggccatcggcaccaactctgtgggctgggccgtgatcaccgacgagtacaaggtgcccagcaagaaattcaaggtgctgggcaacaccgaccggcacagcatcaagaagaacctgatcggagccctgctgttcgacagcggcgaaacagccgaggccacccggctgaagagaaccgccagaagaagatacaccagacggaagaaccggatctgctatctgcaagagatcttcagcaacgagatggccaaggtggacgacagcttcttccacagactggaagagtccttcctggtggaagaggataagaagcacgagcggcaccccatcttcggcaacatcgtggacgaggtggcctaccacgagaagtaccccaccatctaccacctgagaaagaaactggtggacagcaccgacaaggccgacctgcggctgatctatctggccctggcccacatgatcaagttccggggccacttcctgatcgagggcgacctgaaccccgacaacagcgacgtggacaagctgttcatccagctggtgcagacctacaaccagctgttcgaggaaaaccccatcaacgccagcggcgtggacgccaaggccatcctgtctgccagactgagcaagagcagacggctggaaaatctgatcgcccagctgcccggcgagaagaagaatggcctgttcggaaacctgattgccctgagcctgggcctgacccccaacttcaagagcaacttcgacctggccgaggatgccaaactgcagctgagcaaggacacctacgacgacgacctggacaacctgctggcccagatcggcgaccagtacgccgacctgtttctggccgccaagaacctgtccgacgccatcctgctgagcgacatcctgagagtgaacaccgagatcaccaaggcccccctgagcgcctctatgatcaagagatacgacgagcaccaccaggacctgaccctgctgaaagctctcgtgcggcagcagctgcctgagaagtacaaagagattttcttcgaccagagcaagaacggctacgccggctacattgacggcggagccagccaggaagagttctacaagttcatcaagcccatcctggaaaagatggacggcaccgaggaactgctcgtgaagctgaacagagaggacctgctgcggaagcagcggaccttcgacaacggcagcatcccccaccagatccacctgggagagctgcacgccattctgcggcggcaggaagatttttacccattcctgaaggacaaccgggaaaagatcgagaagatcctgaccttccgcatcccctactacgtgggccctctggccaggggaaacagcagattcgcctggatgaccagaaagagcgaggaaaccatcaccccctggaacttcgaggaagtggtggacaagggcgcttccgcccagagcttcatcgagcggatgaccaacttcgataagaacctgcccaacgagaaggtgctgcccaagcacagcctgctgtacgagtacttcaccgtgtataacgagctgaccaaagtgaaatacgtgaccgagggaatgagaaagcccgccttcctgagcggcgagcagaaaaaggccatcgtggacctgctgttcaagaccaaccggaaagtgaccgtgaagcagctgaaagaggactacttcaagaaaatcgagtgcttcgactccgtggaaatctccggcgtggaagatcggttcaacgcctccctgggcacataccacgatctgctgaaaattatcaaggacaaggacttcctggacaatgaggaaaacgaggacattctggaagatatcgtgctgaccctgacactgtttgaggacagagagatgatcgaggaacggctgaaaacctatgcccacctgttcgacgacaaagtgatgaagcagctgaagcggcggagatacaccggctggggcaggctgagccggaagctgatcaacggcatccgggacaagcagtccggcaagacaatcctggatttcctgaagtccgacggcttcgccaacagaaacttcatgcagctgatccacgacgacagcctgacctttaaagaggacatccagaaagcccaggtgtccggccagggcgatagcctgcacgagcacattgccaatctggccggcagccccgccattaagaagggcatcctgcagacagtgaaggtggtggacgagctcgtgaaagtgatgggccggcacaagcccgagaacatcgtgatcgaaatggccagagagaaccagaccacccagaagggacagaagaacagccgcgagagaatgaagcggatcgaagagggcatcaaagagctgggcagccagatcctgaaagaacaccccgtggaaaacacccagctgcagaacgagaagctgtacctgtactacctgcagaatgggcgggatatgtacgtggaccaggaactggacatcaaccggctgtccgactacgatgtggaccatatcgtgcctcagagctttctgaaggacgactccatcgacaacaaggtgctgaccagaagcgacaagaaccggggcaagagcgacaacgtgccctccgaagaggtcgtgaagaagatgaagaactactggcggcagctgctgaacgccaagctgattacccagagaaagttcgacaatctgaccaaggccgagagaggcggcctgagcgaactggataaggccggcttcatcaagagacagctggtggaaacccggcagatcacaaagcacgtggcacagatcctggactcccggatgaacactaagtacgacgagaatgacaagctgatccgggaagtgaaagtgatcaccctgaagtccaagctggtgtccgatttccggaaggatttccagttttacaaagtgcgcgagatcaacaactaccaccacgcccacgacgcctacctgaacgccgtcgtgggaaccgccctgatcaaaaagtaccctaagctggaaagcgagttcgtgtacggcgactacaaggtgtacgacgtgcggaagatgatcgccaagagcgagcaggaaatcggcaaggctaccgccaagtacttcttctacagcaacatcatgaactttttcaagaccgagattaccctggccaacggcgagatccggaagcggcctctgatcgagacaaacggcgaaaccggggagatcgtgtgggataagggccgggattttgccaccgtgcggaaagtgctgagcatgccccaagtgaatatcgtgaaaaagaccgaggtgcagacaggcggcttcagcaaagagtctatcctgcccaagaggaacagcgataagctgatcgccagaaagaaggactgggaccctaagaagtacggcggcttcgacagccccaccgtggcctattctgtgctggtggtggccaaagtggaaaagggcaagtccaagaaactgaagagtgtgaaagagctgctggggatcaccatcatggaaagaagcagcttcgagaagaatcccatcgactttctggaagccaagggctacaaagaagtgaaaaaggacctgatcatcaagctgcctaagtactccctgttcgagctggaaaacggccggaagagaatgctggcctctgccggcgaactgcagaagggaaacgaactggccctgccctccaaatatgtgaacttcctgtacctggccagccactatgagaagctgaagggctcccccgaggataatgagcagaaacagctgtttgtggaacagcacaagcactacctggacgagatcatcgagcagatcagcgagttctccaagagagtgatcctggccgacgctaatctggacaaagtgctgtccgcctacaacaagcaccgggataagcccatcagagagcaggccgagaatatcatccacctgtttaccctgaccaatctgggagcccctgccgccttcaagtactttgacaccaccatcgaccggaagaggtacaccagcaccaaagaggtgctggacgccaccctgatccaccagagcatcaccggcctgtacgagacacggatcgacctgtctcagctgggaggtgactctggcggctcaaaaagaaccgccgacggcagcgaattcgagcccaagaagaagaggaaagtctaaccggtcatcatcaccatcaccattgagtttaaacccgctgatcagcctcgactgtgccttctagttgccagccatctgttgtttgcccctcccccgtgccttccttgaccctggaaggtgccactcccactgtcctttcctaataaaatgaggaaattgcatcgcattgtctgagtaggtgtcattctattctggggggtggggtggggcaggacagcaagggggaggattgggaagacaatagcaggcatgctggggatgcggtgggctctatggcttctgaggcggaaagaaccagctggggctcgataccgtcgacctctagctagagcttggcgtaatcatggtcatagctgtttcctgtgtgaaattgttatccgctcacaattccacacaacatacgagccggaagcataaagtgtaaagcctagggtgcctaatgagtgagctaactcacattaattgcgttgcgctcactgcccgctttccagtcgggaaacctgtcgtgccagctgcattaatgaatcggccaacgcgcggggagaggcggtttgcgtattgggcgctcttccgcttcctcgctcactgactcgctgcgctcggtcgttcggctgcggcgagcggtatcagctcactcaaaggcggtaatacggttatccacagaatcaggggataacgcaggaaagaacatgtgagcaaaaggccagcaaaaggccaggaaccgtaaaaaggccgcgttgctggcgtttttccataggctccgcccccctgacgagcatcacaaaaatcgacgctcaagtcagaggtggcgaaacccgacaggactataaagataccaggcgtttccccctggaagctccctcgtgcgctctcctgttccgaccctgccgcttaccggatacctgtccgcctttctcccttcgggaagcgtggcgctttctcatagctcacgctgtaggtatctcagttcggtgtaggtcgttcgctccaagctgggctgtgtgcacgaaccccccgttcagcccgaccgctgcgccttatccggtaactatcgtcttgagtccaacccggtaagacacgacttatcgccactggcagcagccactggtaacaggattagcagagcgaggtatgtaggcggtgctacagagttcttgaagtggtggcctaactacggctacactagaagaacagtatttggtatctgcgctctgctgaagccagttaccttcggaaaaagagttggtagctcttgatccggcaaacaaaccaccgctggtagcggtggtttttttgtttgcaagcagcagattacgcgcagaaaaaaaggatctcaagaagatcctttgatcttttctacggggtctgacactcagtggaacgaaaactcacgttaagggattttggtcatgagattatcaaaaaggatcttcacctagatccttttaaattaaaaatgaagttttaaatcaatctaaagtatatatgagtaaacttggtctgacagttaccaatgcttaatcagtgaggcacctatctcagcgatctgtctatttcgttcatccatagttgcctgactccccgtcgtgtagataactacgatacgggagggcttaccatctggccccagtgctgcaatgataccgcgagacccacgctcaccggctccagatttatcagcaataaaccagccagccggaagggccgagcgcagaagtggtcctgcaactttatccgcctccatccagtctattaattgttgccgggaagctagagtaagtagttcgccagttaatagtttgcgcaacgttgttgccattgctacaggcatcgtggtgtcacgctcgtcgtttggtatggcttcattcagctccggttcccaacgatcaaggcgagttacatgatcccccatgttgtgcaaaaaagcggttagctccttcggtcctccgatcgttgtcagaagtaagttggccgcagtgttatcactcatggttatggcagcactgcataattctcttactgtcatgccatccgtaagatgcttttctgtgactggtgagtactcaaccaagtcattctgagaatagtgtatgcggcgaccgagttgctcttgcccggcgtcaatacgggataataccgcgccacatagcagaactttaaaagtgctcatcattggaaaacgttcttcggggcgaaaactctcaaggatcttaccgctgttgagatccagttcgatgtaacccactcgtgcacccaactgatcttcagcatcttttactttcaccagcgtttctgggtgagcaaaaacaggaaggcaaaatgccgcaaaaaagggaataagggcgacacggaaatgttgaatactcatactcttcctttttcaatattattgaagcatttatcagggttattgtctcatgagcggatacatatttgaatgtatttagaaaaataaacaaataggggttccgcgcacatttccccgaaaagtgccacctgacgtcgacggatcgggagatcgatctcccgatcccctagggtcgactctcagtacaatctgctctgatgccgcatagttaagccagtatctgctccctgcttgtgtgttggaggtcgctgagtagtgcgcgagcaaaatttaagctacaacaaggcaaggcttgaccgacaattgcatgaagaatctgcttagggttaggcgttttgcgctgcttcgcgatgtacgggccagatatacgcgttgacattgattattgactagttattaatagtaatcaattacggggtcattagttcatagcccatatatggagttccgcgttacataacttacggtaaatggcccgcctggctgaccgcccaacgacccccgcccattgacgtcaataatgacgtatgttcccatagtaacgccaatagggactttccattgacgtcaatgggtggagtatttacggtaaactgcccacttggcagtacatcaagtgtatc

SEQ ID NO: 40 - DNA, 8877 bp, Artificial Sequence
  Description of Artificial Sequence: Synthetic polynucleotide
atatgccaagtacgccccctattgacgtcaatgacggtaaatggcccgcctggcattatgcccagtacatgaccttatgggactttcctacttggcagtacatctacgtattagtcatcgctattaccatggtgatgcggttttggcagtacatcaatgggcgtggatagcggtttgactcacggggatttccaagtctccaccccattgacgtcaatgggagtttgttttggcaccaaaatcaacgggactttccaaaatgtcgtaacaactccgccccattgacgcaaatgggcggtaggcgtgtacggtgggaggtctatataagcagagctggtttagtgaaccgtcagatccgctagagatccgcggccgctaatacgactcactatagggagagccgccaccatgagctcagagactggcccagtggctgtggaccccacattgagacggcggatcgagccccatgagtttgaggtattcttcgatccgagagagctccgcaaggagacctgcctgctttacgaaattaattgggggggccggcactccatttggcgacatacatcacagaacactaacaagcacgtcgaagtcaacttcatcgagaagttcacgacagaaagatatttctgtccgaacacaaggtgcagcattacctggtttctcagctggagcccatgcggcgaatgtagtagggccatcactgaattcctgtcaaggtatccccacgtcactctgtttatttacatcgcaaggctgtaccaccacgctgacccccgcaatcgacaaggcctgcgggatttgatctcttcaggtgtgactatccaaattatgactgagcaggagtcaggatactgctggagaaactttgtgaattatagcccgagtaatgaagcccactggcctaggtatccccatctgtgggtacgactgtacgttcttgaactgtactgcatcatactgggcctgcctccttgtctcaacattctgagaaggaagcagccacagctgacattctttaccatcgctcttcagtcttgtcattaccagcgactgcccccacacattctctgggccaccgggttgaaatctggtggttcttctggtggttctagcggcagcgagactcccgggacctcagagtccgccacacccgaaagttctggtggttcttctggtggttctgataaaaagtattctattggtttagccatcggcactaattccgttggatgggctgtcataaccgatgaatacaaagtaccttcaaagaaatttaaggtgttggggaacacagaccgtcattcgattaaaaagaatcttatcggtgccctcctattcgatagtggcgaaacggcagaggcgactcgcctgaaacgaaccgctcggagaaggtatacacgtcgcaagaaccgaatatgttacttacaagaaatttttagcaatgagatggccaaagttgacgattctttctttcaccgtttggaagagtccttccttgtcgaagaggacaagaaacatgaacggcaccccatctttggaaacatagtagatgaggtggcatatcatgaaaagtacccaacgatttatcacctcagaaaaaagctagttgactcaactgataaagcggacctgaggttaatctacttggctcttgcccatatgataaagttccgtgggcactttctcattgagggtgatctaaatccggacaactcggatgtcgacaaactgttcatccagttagtacaaacctataatcagttgtttgaagagaaccctataaatgcaagtggcgtggatgcgaaggctattcttagcgcccgcctctctaaatcccgacggctagaaaacctgatcgcacaattacccggagagaagaaaaatgggttgttcggtaaccttatagcgctctcactaggcctgacaccaaattttaagtcgaacttcgacttagctgaagatgccaaattgcagcttagtaaggacacgtacgatgacgatctcgacaatctactggcacaaattggagatcagtatgcggacttatttttggctgccaaaaaccttagcgatgcaatcctcctatctgacatactgagagttaatactgagattaccaaggcgccgttatccgcttcaatgatcaaaaggtacgatgaacatcaccaagacttgacacttctcaaggccctagtccgtcagcaactgcctgagaaatataaggaaatattctttgatcagtcgaaaaacgggtacgcaggttatattgacggcggagcgagtcaagaggaattctacaagtttatcaaacccatattagagaagatggatgggacggaagagttgcttgtaaaactcaatcgcgaagatctactgcgaaagcagcggactttcgacaacggtagcattccacatcaaatccacttaggcgaattgcatgctatacttagaaggcaggaggatttttatccgttcctcaaagacaatcgtgaaaagattgagaaaatcctaacctttcgcataccttactatgtgggacccctggcccgagggaactctcggttcgcatggatgacaagaaagtccgaagaaacgattactccatggaattttgaggaagttgtcgataaaggtgcgtcagctcaatcgttcatcgagaggatgaccaactttgacaagaatttaccgaacgaaaaagtattgcctaagcacagtttactttacgagtatttcacagtgtacaatgaactcacgaaagttaagtatgtcactgagggcatgcgtaaacccgcctttctaagcggagaacagaagaaagcaatagtagatctgttattcaagaccaaccgcaaagtgacagttaagcaattgaaagaggactactttaagaaaattgaatgcttcgattctgtcgagatctccggggtagaagatcgatttaatgcgtcacttggtacgtatcatgacctcctaaagataattaaagataaggacttcctggataacgaagagaatgaagatatcttagaagatatagtgttgactcttaccctctttgaagatcgggaaatgattgaggaaagactaaaaacatacgctcacctgttcgacgataaggttatgaaacagttaaagaggcgtcgctatacgggctggggacgattgtcgcggaaacttatcaacgggataagagacaagcaaagtggtaaaactattctcgattttctaaagagcgacggcttcgccaataggaactttatgcagctgatccatgatgactctttaaccttcaaagaggatatacaaaaggcacaggtttccggacaaggggactcattgcacgaacatattgcgaatcttgctggttcgccagccatcaaaaagggcatactccagacagtcaaagtagtggatgagctagttaaggtcatgggacgtcacaaaccggaaaacattgtaatcgagatggcacgcgaaaatcaaacgactcagaaggggcaaaaaaacagtcgagagcggatgaagagaatagaagagggtattaaagaactgggcagccagatcttaaaggagcatcctgtggaaaatacccaattgcagaacgagaaactttacctctattacctacaaaatggaagggacatgtatgttgatcaggaactggacataaaccgtttatctgattacgacgtcgatcacattgtaccccaatcctttttgaaggacgattcaatcgacaataaagtgcttacacgctcggataagaaccgagggaaaagtgacaatgttccaagcgaggaagtcgtaaagaaaatgaagaactattggcggcagctcctaaatgcgaaactgataacgcaaagaaagttcgataacttaactaaagctgagaggggtggcttgtctgaacttgacaaggccggatttattaaacgtcagctcgtggaaacccgccaaatcacaaagcatgttgcacagatactagattcccgaatgaatacgaaatacgacgagaacgataagctgattcgggaagtcaaagtaatcactttaaagtcaaaattggtgtcggacttcagaaaggattttcaattctataaagttagggagataaataactaccaccatgcgcacgacgcttatcttaatgccgtcgtagggaccgcactcattaagaaatacccgaagctagaaagtgagtttgtgtatggtgattacaaagtttatgacgtccgtaagatgatcgcgaaaagcgaacaggagataggcaaggctacagccaaatacttcttttattctaacattatgaatttctttaagacggaaatcactctggcaaacggagagatacgcaaacgacctttaattgaaaccaatggggagacaggtgaaatcgtatgggataagggccgggacttcgcgacggtgagaaaagttttgtccatgccccaagtcaacatagtaaagaaaactgaggtgcagaccggagggttttcaaaggaatcgattcttccaaaaaggaatagtgataagctcatcgctcgtaaaaaggactgggacccgaaaaagtacggtggcttcgatagccctacagttgcctattctgtcctagtagtggcaaaagttgagaagggaaaatccaagaaactgaagtcagtcaaagaattattggggataacgattatggagcgctcgtcttttgaaaagaaccccatcgacttccttgaggcgaaaggttacaaggaagtaaaaaaggatctcataattaaactaccaaagtatagtctgtttgagttagaaaatggccgaaaacggatgttggctagcgccggagagcttcaaaaggggaacgaactcgcactaccgtctaaatacgtgaatttcctgtatttagcgtcccattacgagaagttgaaaggttcacctgaagataacgaacagaagcaactttttgttgagcagcacaaacattatctcgacgaaatcatagagcaaatttcggaattcagtaagagagtcatcctagctgatgccaatctggacaaagtattaagcgcatacaacaagcacagggataaacccatacgtgagcaggcggaaaatattatccatttgtttactcttaccaacctcggcgctccagccgcattcaagtattttgacacaacgatagatcgcaaacgatacacttctaccaaggaggtgctagacgcgacactgattcaccaatccatcacgggattatatgaaactcggatagatttgtcacagcttgggggtgactctggtggttctggaggatctggtggttctactaatctgtcagatattattgaaaaggagaccggtaagcaactggttatccaggaatccatcctcatgctcccagaggaggtggaagaagtcattgggaacaagccggaaagcgatatactcgtgcacaccgcctacgacgagagcaccgacgagaatgtcatgcttctgactagcgacgcccctgaatacaagccttgggctctggtcatacaggatagcaacggtgagaacaagattaagatgctctctggtggttctggaggatctggtggttctactaatctgtcagatattattgaaaaggagaccggtaagcaactggttatccaggaatccatcctcatgctcccagaggaggtggaagaagtcattgggaacaagccggaaagcgatatactcgtgcacaccgcctacgacgagagcaccgacgagaatgtcatgcttctgactagcgacgcccctgaatacaagccttgggctctggtcatacaggatagcaacggtgagaacaagattaagatgctctctggtggttctcccaagaagaagaggaaagtctaaccggtcatcatcaccatcaccattgagtttaaacccgctgatcagcctcgactgtgccttctagttgccagccatctgttgtttgcccctcccccgtgccttccttgaccctggaaggtgccactcccactgtcctttcctaataaaatgaggaaattgcatcgcattgtctgagtaggtgtcattctattctggggggtggggtggggcaggacagcaagggggaggattgggaagacaatagcaggcatgctggggatgcggtgggctctatggcttctgaggcggaaagaaccagctggggctcgataccgtcgacctctagctagagcttggcgtaatcatggtcatagctgtttcctgtgtgaaattgttatccgctcacaattccacacaacatacgagccggaagcataaagtgtaaagcctagggtgcctaatgagtgagctaactcacattaattgcgttgcgctcactgcccgctttccagtcgggaaacctgtcgtgccagctgcattaatgaatcggccaacgcgcggggagaggcggtttgcgtattgggcgctcttccgcttcctcgctcactgactcgctgcgctcggtcgttcggctgcggcgagcggtatcagctcactcaaaggcggtaatacggttatccacagaatcaggggataacgcaggaaagaacatgtgagcaaaaggccagcaaaaggccaggaaccgtaaaaaggccgcgttgctggcgtttttccataggctccgcccccctgacgagcatcacaaaaatcgacgctcaagtcagaggtggcgaaacccgacaggactataaagataccaggcgtttccccctggaagctccctcgtgcgctctcctgttccgaccctgccgcttaccggatacctgtccgcctttctcccttcgggaagcgtggcgctttctcatagctcacgctgtaggtatctcagttcggtgtaggtcgttcgctccaagctgggctgtgtgcacgaaccccccgttcagcccgaccgctgcgccttatccggtaactatcgtcttgagtccaacccggtaagacacgacttatcgccactggcagcagccactggtaacaggattagcagagcgaggtatgtaggcggtgctacagagttcttgaagtggtggcctaactacggctacactagaagaacagtatttggtatctgcgctctgctgaagccagttaccttcggaaaaagagttggtagctcttgatccggcaaacaaaccaccgctggtagcggtggtttttttgtttgcaagcagcagattacgcgcagaaaaaaaggatctcaagaagatcctttgatcttttctacggggtctgacgctcagtggaacgaaaactcacgttaagggattttggtcatgagattatcaaaaaggatcttcacctagatccttttaaattaaaaatgaagttttaaatcaatctaaagtatatatgagtaaacttggtctgacagttaccaatgcttaatcagtgaggcacctatctcagcgatctgtctatttcgttcatccatagttgcctgactccccgtcgtgtagataactacgatacgggagggcttaccatctggccccagtgctgcaatgataccgcgagacccacgctcaccggctccagatttatcagcaataaaccagccagccggaagggccgagcgcagaagtggtcctgcaactttatccgcctccatccagtctattaattgttgccgggaagctagagtaagtagttcgccagttaatagtttgcgcaacgttgttgccattgctacaggcatcgtggtgtcacgctcgtcgtttggtatggcttcattcagctccggttcccaacgatcaaggcgagttacatgatcccccatgttgtgcaaaaaagcggttagctccttcggtcctccgatcgttgtcagaagtaagttggccgcagtgttatcactcatggttatggcagcactgcataattctcttactgtcatgccatccgtaagatgcttttctgtgactggtgagtactcaaccaagtcattctgagaatagtgtatgcggcgaccgagttgctcttgcccggcgtcaatacgggataataccgcgccacatagcagaactttaaaagtgctcatcattggaaaacgttcttcggggcgaaaactctcaaggatcttaccgctgttgagatccagttcgatgtaacccactcgtgcacccaactgatcttcagcatcttttactttcaccagcgtttctgggtgagcaaaaacaggaaggcaaaatgccgcaaaaaagggaataagggcgacacggaaatgttgaatactcatactcttcctttttcaatattattgaagcatttatcagggttattgtctcatgagcggatacatatttgaatgtatttagaaaaataaacaaataggggttccgcgcacatttccccgaaaagtgccacctgacgtcgacggatcgggagatcgatctcccgatcccctagggtcgactctcagtacaatctgctctgatgccgcatagttaagccagtatctgctccctgcttgtgtgttggaggtcgctgagtagtgcgcgagcaaaatttaagctacaacaaggcaaggcttgaccgacaattgcatgaagaatctgcttagggttaggcgttttgcgctgcttcgcgatgtacgggccagatatacgcgttgacattgattattgactagttattaatagtaatcaattacggggtcattagttcatagcccatatatggagttccgcgttacataacttacggtaaatggcccgcctggctgaccgcccaacgacccccgcccattgacgtcaataatgacgtatgttcccatagtaacgccaatagggactttccattgacgtcaatgggtggagtatttacggtaaactgcccacttggcagtacatcaagtgtatc

SEQ ID NO: 41 - DNA, 5508 bp, Artificial Sequence
  Description of Artificial Sequence: Synthetic polynucleotide
atgagctcagagactggcccagtggctgtggaccccacattgagacggcggatcgagccccatgagtttgaggtattcttcgatccgagagagctccgcaaggagacctgcctgctttacgaaattaattgggggggccggcactccatttggcgacatacatcacagaacactaacaagcacgtcgaagtcaacttcatcgagaagttcacgacagaaagatatttctgtccgaacacaaggtgcagcattacctggtttctcagctggagccgcgaatgtagtagggccatcactgaattcctgtcaaggtatccccacgtcactctgtttatttacatcgcaaggctgtaccaccacgctgacccccgcaatcgacaaggcctgcgggatttgatctcttcaggtgtgactatccaaattatgactgagcaggagtcaggatactgctggagaaactttgtgaattatagcccgagtaatgaagcccactggcctaggtatccccatctgtgggtacgactgtacgttcttgaactgtactgcatcatactgggcctgcctccttgtctcaacattctgagaaggaagcagccacagctgacattctttaccatcgctcttcagtcttgtcattaccagcgactgcccccacacattctctgggccaccgggttgaaatctggtggttcttctggtggttctagcggcagcgagactcccgggacctcagagtccgccacacccgaaagttctggtggttcttctggtggttctgataaaaagtattctattggtttagccatcggcactaattccgttggatgggctgtcataaccgatgaatacaaagtaccttcaaagaaatttaaggtgttggggaacacagaccgtcattcgattaaaaagaatcttatcggtgccctcctattcgatagtggcgaaacggcagaggcgactcgcctgaaacgaaccgctcggagaaggtatacacgtcgcaagaaccgaatatgttacttacaagaaatttttagcaatgagatggccaaagttgacgattctttctttcaccgtttggaagagtccttccttgtcgaagaggacaagaaacatgaacggcaccccatctttggaaacatagtagatgaggtggcatatcatgaaaagtacccaacgatttatcacctcagaaaaaagctagttgactcaactgataaagcggacctgaggttaatctacttggctcttgcccatatgataaagttccgtgggcactttctcattgagggtgatctaaatccggacaactcggatgtcgacaaactgttcatccagttagtacaaacctataatcagttgtttgaagagaaccctataaatgcaagtggcgtggatgcgaaggctattcttagcgcccgcctctctaaatcccgacggctagaaaacctgatcgcacaattacccggagagaagaaaaatgggttgttcggtaaccttatagcgctctcactaggcctgacaccaaattttaagtcgaacttcgacttagctgaagatgccaaattgcagcttagtaaggacacgtacgatgacgatctcgacaatctactggcacaaattggagatcagtatgcggacttatttttggctgccaaaaaccttagcgatgcaatcctcctatctgacatactgagagttaatactgagattaccaaggcgccgttatccgcttcaatgatcaaaaggtacgatgaacatcaccaagacttgacacttctcaaggccctagtccgtcagcaactgcctgagaaatataaggaaatattctttgatcagtcgaaaaacgggtacgcaggttatattgacggcggagcgagtcaagaggaattctacaagtttatcaaacccatattagagaagatggatgggacggaagagttgcttgtaaaactcaatcgcgaagatctactgcgaaagcagcggactttcgacaacggtagcattccacatcaaatccacttaggcgaattgcatgctatacttagaaggcaggaggatttttatccgttcctcaaagacaatcgtgaaaagattgagaaaatcctaacctttcgcataccttactatgtgggacccctggcccgagggaactctcggttcgcatggatgacaagaaagtccgaagaaacgattactccatggaattttgaggaagttgtcgataaaggtgcgtcagctcaatcgttcatcgagaggatgaccaactttgacaagaatttaccgaacgaaaaagtattgcctaagcacagtttactttacgagtatttcacagtgtacaatgaactcacgaaagttaagtatgtcactgagggcatgcgtaaacccgcctttctaagcggagaacagaagaaagcaatagtagatctgttattcaagaccaaccgcaaagtgacagttaagcaattgaaagaggactactttaagaaaattgaatgcttcgattctgtcgagatctccggggtagaagatcgatttaatgcgtcacttggtacgtatcatgacctcctaaagataattaaagataaggacttcctggataacgaagagaatgaagatatcttagaagatatagtgttgactcttaccctctttgaagatcgggaaatgattgaggaaagactaaaaacatacgctcacctgttcgacgataaggttatgaaacagttaaagaggcgtcgctatacgggctggggacgattgtcgcggaaacttatcaacgggataagagacaagcaaagtggtaaaactattctcgattttctaaagagcgacggcttcgccaataggaactttatgcagctgatccatgatgactctttaaccttcaaagaggatatacaaaaggcacaggtttccggacaaggggactcattgcacgaacatattgcgaatcttgctggttcgccagccatcaaaaagggcatactccagacagtcaaagtagtggatgagctagttaaggtcatgggacgtcacaaaccggaaaacattgtaatcgagatggcacgcgaaaatcaaacgactcagaaggggcaaaaaaacagtcgagagcggatgaagagaatagaagagggtattaaagaactgggcagccagatcttaaaggagcatcctgtggaaaatacccaattgcagaacgagaaactttacctctattacctacaaaatggaagggacatgtatgttgatcaggaactggacataaaccgtttatctgattacgacgtcgatcacattgtaccccaatcctttttgaaggacgattcaatcgacaataaagtgcttacacgctcggataagaaccgagggaaaagtgacaatgttccaagcgaggaagtcgtaaagaaaatgaagaactattggcggcagctcctaaatgcgaaactgataacgcaaagaaagttcgataacttaactaaagctgagaggggtggcttgtctgaacttgacaaggccggatttattaaacgtcagctcgtggaaacccgccaaatcacaaagcatgttgcacagatactagattcccgaatgaatacgaaatacgacgagaacgataagctgattcgggaagtcaaagtaatcactttaaagtcaaaattggtgtcggacttcagaaaggattttcaattctataaagttagggagataaataactaccaccatgcgcacgacgcttatcttaatgccgtcgtagggaccgcactcattaagaaatacccgaagctagaaagtgagtttgtgtatggtgattacaaagtttatgacgtccgtaagatgatcgcgaaaagcgaacaggagataggcaaggctacagccaaatacttcttttattctaacattatgaatttctttaagacggaaatcactctggcaaacggagagatacgcaaacgacctttaattgaaaccaatggggagacaggtgaaatcgtatgggataagggccgggacttcgcgacggtgagaaaagttttgtccatgccccaagtcaacatagtaaagaaaactgaggtgcagaccggagggttttcaaaggaatcgattcttccaaaaaggaatagtgataagctcatcgctcgtaaaaaggactgggacccgaaaaagtacggtggcttcgatagccctacagttgcctattctgtcctagtagtggcaaaagttgagaagggaaaatccaagaaactgaagtcagtcaaagaattattggggataacgattatggagcgctcgtcttttgaaaagaaccccatcgacttccttgaggcgaaaggttacaaggaagtaaaaaaggatctcataattaaactaccaaagtatagtctgtttgagttagaaaatggccgaaaacggatgttggctagcgccggagagcttcaaaaggggaacgaactcgcactaccgtctaaatacgtgaatttcctgtatttagcgtcccattacgagaagttgaaaggttcacctgaagataacgaacagaagcaactttttgttgagcagcacaaacattatctcgacgaaatcatagagcaaatttcggaattcagtaagagagtcatcctagctgatgccaatctggacaaagtattaagcgcatacaacaagcacagggataaacccatacgtgagcaggcggaaaatattatccatttgtttactcttaccaacctcggcgctccagccgcattcaagtattttgacacaacgatagatcgcaaacgatacacttctaccaaggaggtgctagacgcgacactgattcaccaatccatcacgggattatatgaaactcggatagatttgtcacagcttgggggtgactctggtggttctggaggatctggtggttctactaatctgtcagatattattgaaaaggagaccggtaagcaactggttatccaggaatccatcctcatgctcccagaggaggtggaagaagtcattgggaacaagccggaaagcgatatactcgtgcacaccgcctacgacgagagcaccgacgagaatgtcatgcttctgactagcgacgcccctgaatacaagccttgggctctggtcatacaggatagcaacggtgagaacaagattaagatgctctctggtggttctggaggatctggtggttctactaatctgtcagatattattgaaaaggagaccggtaagcaactggttatccaggaatccatcctcatgctcccagaggaggtggaagaagtcattgggaacaagccggaaagcgatatactcgtgcacaccgcctacgacgagagcaccgacgagaatgtcatgcttctgactagcgacgcccctgaatacaagccttgggctctggtcatacaggatagcaacggtgagaacaagattaagatgctctctggtggttctaaaaggacggcggacggatcagagttcgagagtccgaaaaaaaaacgaaaggtcgaataa

SEQ ID NO: 42 - DNA, 5514 bp, Artificial Sequence
  Description of Artificial Sequence: Synthetic polynucleotide
atgtcatccgaaaccgggccagtggccgtagacccaacactcaggaggcggatagaaccccatgagtttgaagtgttcttcgaccccagagagctgcgcaaagagacttgcctcctgtatgaaataaattgggggggtcgccattcaatttggaggcacactagccagaatactaacaaacacgtggaggtaaattttatcgagaagtttaccaccgaaagatacttttgccccaatacacggtgttcaattacctggtttctgtcatggagtccatgtggagaatgtagtagagcgataactgagttcctgtctcgatatcctcacgtcacgttgtttatatacatcgctcggctttatcaccatgcggacccgcggaacaggcaaggtcttcgggacctcatatcctctggggtgaccatccagataatgacggagcaagagagcggatactgctggcgaaactttgttaactacagcccaagcaatgaggcacactggcctagatatccgcatctctgggttcgactgtatgtccttgaactgtactgcataattctgggacttccgccatgcttgaacattctgcggcggaaacaaccacagctgacctttttcacgattgctctccaaagttgtcactaccagcgattgccaccccacatcttgtgggctactggactcaagtctggaggaagttcaggcggaagcagcgggtctgaaacgcccggaacctcagagagcgcaacgcccgaaagctctggagggtcaagtggtggtagtgataagaaatactccatcggcctcgccatcggtacgaattctgtcggttgggccgttatcaccgatgagtacaaggtcccttctaagaaattcaaggttttgggcaatacagaccgccattctataaaaaaaaacctgatcggcgcccttttgtttgacagtggtgagactgctgaagcgactcgcctgaagcgaactgccaggaggcggtatacgaggcgaaaaaaccgaatttgttacctccaggagattttctcaaatgaaatggccaaggtagatgatagtttttttcaccgcttggaagaaagttttctcgttgaggaggacaaaaagcacgagaggcacccaatctttggcaacatagtcgatgaggtcgcataccatgagaaatatcctacgatctatcatctccgcaagaagctggtcgatagcacggataaagctgacctccggctgatctaccttgctcttgctcacatgattaaattcaggggccatttcctgatagaaggagacctcaatcccgacaattctgatgtcgacaaactgtttattcagctcgttcagacctataatcaactctttgaggagaaccccatcaatgcttcaggggtggacgcaaaggccattttgtccgcgcgcttgagtaaatcacgacgcctcgagaatttgatagctcaactgccgggtgagaagaaaaacgggttgtttgggaatctcatagcgttgagtttgggacttacgccaaactttaagtctaactttgatttggccgaagatgccaaattgcagctgtccaaagatacctatgatgacgacttggataaccttcttgcgcagattggtgaccaatacgcggatctgtttcttgccgcaaaaaatctgtccgacgccatactcttgtccgatatactgcgcgtcaatactgagataactaaggctcccctcagcgcgtccatgattaaaagatacgatgagcaccaccaagatctcactctgttgaaagccctggttcgccagcagcttccagagaagtataaggagatatttttcgaccaatctaaaaacggctatgcgggttacattgacggtggcgcctctcaagaagaattctacaagtttataaagccgatacttgagaaaatggacggtacagaggaattgttggttaagctcaatcgcgaggacttgttgagaaagcagcgcacatttgacaatggtagtattccacaccagattcatctgggcgagttgcatgccattcttagaagacaagaagatttttatccgtttctgaaagataacagagaaaagattgaaaagatacttacctttcgcataccgtattatgtaggtcccctggctagagggaacagtcgcttcgcttggatgactcgaaaatcagaagaaacaataaccccctggaattttgaagaagtggtagataaaggtgcgagtgcccaatcttttattgagcggatgacaaattttgacaagaatctgcctaacgaaaaggtgcttcccaagcattcccttttgtatgaatactttacagtatataatgaactgactaaagtgaagtacgttaccgaggggatgcgaaagccagcttttctcagtggcgagcagaaaaaagcaatagttgacctgctgttcaagacgaataggaaggttaccgtcaaacagctcaaagaagattactttaaaaagatcgaatgttttgattcagttgagataagcggagtagaggatagatttaacgcaagtcttggaacttatcatgaccttttgaagatcatcaaggataaagattttttggacaacgaggagaatgaagatatcctggaagatatagtacttaccttgacgctttttgaagatcgagagatgatcgaggagcgacttaagacgtacgcacatctctttgacgataaggttatgaaacaattgaaacgccggcggtatactggctggggcaggctttctcgaaagctgattaatggtatccgcgataagcagtctggaaagacaatccttgactttctgaaaagtgatggatttgcaaatagaaactttatgcagcttatacatgatgactctttgacgttcaaggaagacatccagaaggcacaggtatccggccaaggggatagcctccatgaacacatagccaacctggccggctcaccagctattaaaaagggaatattgcaaaccgttaaggttgttgacgaactcgttaaggttatgggccgacacaaaccagagaatatcgtgattgagatggctagggagaatcagaccactcaaaaaggtcagaaaaattctcgcgaaaggatgaagcgaattgaagagggaatcaaagaacttggctctcaaattttgaaagagcacccggtagaaaacactcagctgcagaatgaaaagctgtatctgtattatctgcagaatggtcgagatatgtacgttgatcaggagctggatatcaataggctcagtgactacgatgtcgaccacatcgttcctcaatctttcctgaaagatgactctatcgacaacaaagtgttgacgcgatcagataagaaccggggaaaatccgacaatgtaccctcagaagaagttgtcaagaagatgaaaaactattggagacaattgctgaacgccaagctcataacacaacgcaagttcgataacttgacgaaagccgaaagaggtgggttgtcagaattggacaaagctggctttattaagcgccaattggtggagacccggcagattacgaaacacgtagcacaaattttggattcacgaatgaataccaaatacgacgaaaacgacaaattgatacgcgaggtgaaagtgattacgcttaagagtaagttggtttccgatttcaggaaggattttcagttttacaaagtaagagaaataaacaactaccaccacgcccatgatgcttacctcaacgcggtagttggcacagctcttatcaaaaaatatccaaagctggaaagcgagttcgtttacggtgactataaagtatacgacgttcggaagatgatagccaaatcagagcaggaaattgggaaggcaaccgcaaaatacttcttctattcaaacatcatgaacttctttaagacggagattacgctcgcgaacggcgaaatacgcaagaggcccctcatagagactaacggcgaaaccggggagatcgtatgggacaaaggacgggactttgcgaccgttagaaaagtactttcaatgccacaagtgaatattgttaaaaagacagaagtacaaacaggggggttcagtaaggaatccattttgcccaagcggaacagtgataaattgatagcaaggaaaaaagattgggaccctaagaagtacggtggtttcgactctcctaccgttgcatattcagtccttgtagttgcgaaagtggaaaaggggaaaagtaagaagcttaagagtgttaaagagcttctgggcataaccataatggaacggtctagcttcgagaaaaatccaattgactttctcgaggctaaaggttacaaggaggtaaaaaaggacctgataattaaactcccaaagtacagtctcttcgagttggagaatgggaggaagagaatgttggcatctgcaggggagctccaaaaggggaacgagctggctctgccttcaaaatacgtgaactttctgtacctggccagccactacgagaaactcaagggttctcctgaggataacgagcagaaacagctgtttgtagagcagcacaagcattacctggacgagataattgagcaaattagtgagttctcaaaaagagtaatccttgcagacgcgaatctggataaagttctttccgcctataataagcaccgggacaagcctatacgagaacaagccgagaacatcattcacctctttacccttactaatctgggcgcgccggccgccttcaaatacttcgacaccacgatagacaggaaaaggtatacgagtaccaaagaagtacttgacgccactctcatccaccagtctataacagggttgtacgaaacgaggatagatttgtcccagctcggcggcgactcaggagggtcaggcggctccggtggatcaacgaatctttccgacataatcgagaaagaaaccggcaaacagttggtgatccaagaatcaatcctgatgctgcctgaagaagtagaagaggtgattggcaacaaacctgagtctgacattcttgtccacaccgcgtatgacgagagcacggacgagaacgttatgcttctcactagcgacgcccctgagtataaaccatgggcgctggtcatccaagattccaatggggaaaacaagattaagatgcttagtggtgggtctggagggagcggtgggtccacgaacctcagcgacattattgaaaaagagactggtaaacaacttgtaatacaagagtctattctgatgttgcctgaagaggtggaggaggtgattgggaacaaaccggagtctgatatacttgttcataccgcctatgacgaatctactgatgagaatgtgatgcttttaacgtcagacgctcccgagtacaaaccctgggctctggtgattcaggacagcaatggtgagaataagattaaaatgttgagtgggggctcaaagcgcacggctgacggtagcgaatttgagagccccaaaaaaaaacgaaaggtcgaataa

SEQ ID NO: 43 - DNA, 5514 bp, Artificial Sequence
  Description of Artificial Sequence: Synthetic polynucleotide
atgagcagcgagacaggccctgtggctgtggatcctacactgcggagaagaatcgagccccacgagttcgaggtgttcttcgaccccagagagctgcggaaagagacatgcctgctgtacgagatcaactggggcggcagacactctatctggcggcacacaagccagaacaccaacaagcacgtggaagtgaactttatcgagaagtttacgaccgagcggtacttctgccccaacaccagatgcagcatcacctggtttctgagctggtccccttgcggcgagtgcagcagagccatcaccgagtttctgtccagatatccccacgtgaccctgttcatctatatcgcccggctgtaccaccacgccgatcctagaaatagacagggactgcgcgacctgatcagcagcggagtgaccatccagatcatgaccgagcaagagagcggctactgctggcggaacttcgtgaactacagccccagcaacgaagcccactggcctagatatcctcacctgtgggtccgactgtacgtgctggaactgtactgcatcatcctgggcctgcctccatgcctgaacatcctgagaagaaagcagcctcagctgaccttcttcacaatcgccctgcagagctgccactaccagagactgcctccacacatcctgtgggccaccggacttaagagcggaggatctagcggcggctctagcggatctgagacacctggcacaagcgagtctgccacacctgagagtagcggcggatcttctggcggctccgacaagaagtactctatcggactggccatcggcaccaactctgttggatgggccgtgatcaccgacgagtacaaggtgcccagcaagaaattcaaggtgctgggcaacaccgaccggcacagcatcaagaagaatctgatcggcgccctgctgttcgactctggcgaaacagccgaagccaccagactgaagagaaccgccaggcggagatacacccggcggaagaaccggatctgctacctgcaagagatcttcagcaacgagatggccaaggtggacgacagcttcttccacagactggaagagtccttcctggtggaagaggacaagaagcacgagcggcaccccatcttcggcaacatcgtggatgaggtggcctaccacgagaagtaccccaccatctaccacctgagaaagaaactggtggacagcaccgacaaggccgacctgagactgatctacctggctctggcccacatgatcaagttccggggccactttctgatcgagggcgatctgaaccccgacaacagcgacgtggacaagctgttcatccagctggtgcagacctacaaccagctgttcgaggaaaaccccatcaacgcctctggcgtggacgccaaggctatcctgtctgccagactgagcaagagcagaaggctggaaaacctgatcgcccagctgcctggcgagaagaagaatggcctgttcggcaacctgattgccctgagcctgggactgacccctaacttcaagagcaacttcgacctggccgaggatgccaaactgcagctgagcaaggacacctacgacgacgacctggacaatctgctggcccagatcggcgatcagtacgccgacttgtttctggccgccaagaacctgtccgacgccatcctgctgagcgatatcctgagagtgaacaccgagatcacaaaggcccctctgagcgcctctatgatcaagagatacgacgagcaccaccaggatctgaccctgctgaaggccctcgttagacagcagctgccagagaagtacaaagagattttcttcgatcagtccaagaacggctacgccggctacattgatggcggagccagccaagaggaattctacaagttcatcaagcccatcctggaaaagatggacggcaccgaggaactgctggtcaagctgaacagagaggacctgctgcggaagcagcggaccttcgacaatggctctatccctcaccagatccacctgggagagctgcacgccattctgcggagacaagaggacttttacccattcctgaaggacaaccgggaaaagatcgagaagatcctgaccttcaggatcccctactacgtgggaccactggccagaggcaatagcagattcgcctggatgaccagaaagagcgaggaaaccatcacaccctggaacttcgaggaagtggtggacaagggcgccagcgctcagtccttcatcgagcggatgaccaacttcgataagaacctgcctaacgagaaggtgctgcccaagcactccctgctgtatgagtacttcaccgtgtacaacgagctgaccaaagtgaaatacgtgaccgagggaatgagaaagcccgcctttctgagcggcgagcagaaaaaggccattgtggatctgctgttcaagaccaaccggaaagtgaccgtgaagcagctgaaagaggactacttcaagaaaatcgagtgcttcgacagcgtggaaatcagcggcgtggaagatcggttcaatgccagcctgggcacataccacgacctgctgaaaattatcaaggacaaggacttcctggacaacgaagagaacgaggacattctcgaggacatcgtgctgaccctgacactgtttgaggacagagagatgatcgaggaacggctgaaaacatacgcccacctgttcgacgacaaagtgatgaagcaactgaagcggaggcggtacacaggctggggcagactgtctcggaagctgatcaacggcatccgggataagcagtccggcaagacaatcctggatttcctgaagtccgacggcttcgccaacagaaacttcatgcagctgatccacgacgacagcctgacctttaaagaggacatccagaaagcccaggtgtccggccaaggcgattctctgcacgagcacattgccaacctggccggatctcccgccattaagaagggcatcctgcagacagtgaaggtggtggacgagcttgtgaaagtgatgggcagacacaagcccgagaacatcgtgatcgaaatggccagagagaaccagaccacacagaagggccagaagaacagccgcgagagaatgaagcggatcgaagagggcatcaaagagctgggcagccagatcctgaaagaacaccccgtggaaaacacccagctgcagaacgagaagctgtacctgtactacctgcagaatggacgggatatgtacgtggaccaagagctggacatcaaccggctgagcgactacgatgtggaccatatcgtgccccagagctttctgaaggacgactccatcgataacaaggtcctgaccagaagcgacaagaaccggggcaagagcgataacgtgccctccgaagaggtggtcaagaagatgaagaactactggcgacagctgctgaacgccaagctgattacccagcggaagttcgataacctgaccaaggccgagagaggcggcctgagcgaacttgataaggccggcttcattaagcggcagctggtggaaacccggcagatcaccaaacacgtggcacagattctggactcccggatgaacactaagtacgacgagaatgacaagctgatccgggaagtgaaagtcatcaccctgaagtctaagctggtgtccgatttccggaaggatttccagttctacaaagtgcgggaaatcaacaactaccatcacgcccacgacgcctacctgaatgccgttgttggaacagccctgatcaagaagtatcccaagctggaaagcgagttcgtgtacggcgactacaaggtgtacgacgtgcggaagatgatcgccaagagcgaacaagagatcggcaaggctaccgccaagtactttttctacagcaacatcatgaactttttcaagacagagatcaccctggccaacggcgagatccggaaaagacccctgatcgagacaaacggcgaaaccggggagatcgtgtgggataagggcagagattttgccacagtgcggaaagtgctgagcatgccccaagtgaatatcgtgaagaaaaccgaggtgcagacaggcggcttcagcaaagagtctatcctgcctaagcggaacagcgataagctgatcgccagaaagaaggactgggaccctaagaagtacggcggcttcgatagccctaccgtggcctattctgtgctggtggtggccaaagtggaaaagggcaagtccaaaaagctcaagagcgtgaaagagctgctggggatcaccatcatggaaagaagcagctttgagaagaacccgatcgactttctggaagccaagggctacaaagaagtcaagaaggacctcatcatcaagctccccaagtacagcctgttcgagctggaaaatggccggaagcggatgctggcctcagcaggcgaactgcagaaaggcaatgaactggccctgcctagcaaatacgtcaacttcctgtacctggccagccactatgagaagctgaagggcagccccgaggacaatgagcaaaagcagctgtttgtggaacagcacaagcactacctggacgagatcatcgagcagatcagcgagttctccaagagagtgatcctggccgacgctaacctggataaggtgctgtctgcctataacaagcaccgggacaagcctatcagagagcaggccgagaatatcatccacctgtttaccctgaccaacctgggagcccctgccgccttcaagtacttcgacaccaccatcgaccggaagaggtacaccagcaccaaagaggtgctggacgccacactgatccaccagtctatcaccggcctgtacgaaacccggatcgacctgtctcagctcggcggcgattctggtggttctggcggaagtggcggatccaccaatctgagcgacatcatcgaaaaagagacaggcaagcagctcgtgatccaagaatccatcctgatgctgcctgaagaggttgaggaagtgatcggcaacaagcctgagtccgacatcctggtgcacaccgcctacgatgagagcaccgatgagaacgtcatgctgctgacaagcgacgcccctgagtacaagccttgggctctcgtgattcaggacagcaatggggagaacaagatcaagatgctgagcggaggtagcggaggcagtggcggaagcacaaacctgtctgatatcattgaaaaagaaaccgggaagcaactggtcattcaagagtccattctcatgctcccggaagaagtcgaggaagtcattggaaacaaacccgagagcgatattctggtccacacagcctatgacgagtctacagacgaaaacgtgatgctcctgacctctgacgctcccgagtataagccctgggcacttgttatccaggactctaacggggaaaacaaaatcaaaatgttgtccggcggcagcaagcggacagccgatggatctgagttcgagagccccaagaagaaacggaaggtggagtaa

SEQ ID NO: 44 - protein, 1367 aa, Streptococcus pyogenes
MDKKYSIGLDIGTNSVGWAVITDDYKVPSKKFKVLGNTDRHSIKKNLIGALLFGSGETAEATRLKRTARRRYTRRKNRICYLQEIFSNEMAKVDDSFFHRLEESFLVEEDKKHERHPIFGNIVDEVAYHEKYPTIYHLRKKLADSTDKADLRLIYLALAHMIKFRGHFLIEGDLNPDNSDVDKLFIQLVQIYNQLFEENPINASRVDAKAILSARLSKSRRLENLIAQLPGEKRNGLFGNLIALSLGLTPNFKSNFDLAEDAKLQLSKDTYDDDLDNLLAQIGDQYADLFLAAKNLSDAILLSDILRVNSEITKAPLSASMIKRYDEHHQDLTLLKALVRQQLPEKYKEIFFDQSKNGYAGYIDGGASQEEFYKFIKPILEKMDGTEELLVKLNREDLLRKQRTFDNGSIPHQIHLGELHAILRRQEDFYPFLKDNREKIEKILTFRIPYYVGPLARGNSRFAWMTRKSEETITPWNFEEVVDKGASAQSFIERMTNFDKNLPNEKVLPKHSLLYEYFTVYNELTKVKYVTEGMRKPAFLSGEQKKAIVDLLFKTNRKVTVKQLKEDYFKKIECFDSVEISGVEDRFNASLGAYHDLLKIIKDKDFLDNEENEDILEDIVLTLTLFEDRGMIEERLKTYAHLFDDKVMKQLKRRRYTGWGRLSRKLINGIRDKQSGKTILDFLKSDGFANRNFMQLIHDDSLTFKEDIQKAQVSGQGHSLHEQIANLAGSPAIKKGILQTVKIVDELVKVMGHKPENIVIEMARENQTTQKGQKNSRERMKRIEEGIKELGSQILKEHPVENTQLQNEKLYLYYLQNGRDMYVDQELDINRLSDYDVDHIVPQSFIKDDSIDNKVLTRSDKNRGKSDNVPSEEVVKKMKNYWRQLLNAKLITQRKFDNLTKAERGGLSELDKAGFIKRQLVETRQITKHVAQILDSRMNTKYDENDKLIREVKVITLKSKLVSDFRKDFQFYKVREINNYHHAHDAYLNAVVGTALIKKYPKLESEFVYGDYKVYDVRKMIAKSEQEIGKATAKYFFYSNIMNFFKTEITLANGEIRKRPLIETNGETGEIVWDKGRDFATVRKVLSMPQVNIVKKTEVQTGGFSKESILPKRNSDKLIARKKDWDPKKYGGFDSPTVAYSVLVVAKVEKGKSKKLKSVKELLGITIMERSSFEKNPIDFLEAKGYKEVKKDLIIKLPKYSLFELENGRKRMLASAGELQKGNELALPSKYVNFLYLASHYEKLKGSPEDNEQKQLFVEQHKHYLDEIIEQISEFSKRVILADANLDKVLSAYNKHRDKPIREQAENIIHLFTLTNLGAPAAFKYFDTTIDRKRYTSTKEVLDATLIHQSITGLYETRIDLSQLGGD

SEQ ID NO: 45 - protein, 190 aa, Hepatitis B virus
MPLSYQHFRRLLLLDDEAGPLEEELPRLADEGLNRRVAEDLNLGNLNVSIPWTHKVGNFTGLYSSTVPVFNPHWKTPSFPNIHLHQDIIKKCEQFVGPLTVNEKRRLQLIMPARFYPKVTKYLPLDKGIKPYYPEHLVNHYFQTRHYLHTLWKAGILYKRETTHSASFCGSPYSWEQDLQHGAESFHQQS

SEQ ID NO: 46 - protein, 832 aa, Hepatitis B virus
MPLSYQHFRKLLLLDDEAGPLEEELPRLADEGLNRRVAEDLNLGNLNVSIPWTHKVGNFTGLYSSTVPVFNPHWKTPSFPNIHLHQDIIKKCEQFVGPLTVNEKRRLQLIMPARFYPKVTKYLPLDKGIKPYYPEHLVNHYFQTRHYLHTLWKAGILYKRETTHSASFCGSPYSWEQDLQHGAESFHQQSSGILSRPPVGSSLQSKHSKSRLGLQSQQGHLARRQQGRSWSIRAGFHPTARRPFGVEPSGSGHTTNFASKSASCLHQSPDRKAAYPAVSTFEKHSSSGHAVEFHNLSPNSARSQSERPVFPCWWLQFRSSKPCSDYCLSLIVNLLEDWGPCAEHGEHHIRIPRTPSRVTGGVFLVDKNPHNTAESRLVVDFSQFSRGNYRVSWPKFAVPNLQSLTNLLSSNLSWLSLDVSAAFYHLPLHPAAMPHLLVGSSGLSRYVARLSSNSRILNHQHGTMPNLHDYCSRNLYVSLLLLYQTFGRKLHLYSHPIILGFRKIPMGVGLSPFLLAQFTSAICSVVRRAFPHCLAFSYMDDVVLGAKSVQHLESLFTAVTNFLLSLGIHLNPNKTKRWGYSLNFMGYVIGSYGSLPQEHIIQKIKECFRKLPINRPIDWKVCQRIVGLLGFAAPFTQCGYPALMPLYACIQSKQAFTFSPTYKAFLCKQYLNLYPVARQRPGLCQVFADATPTGWGLVMGHQRVRGTFSAPLPIHTAELLAACFARSRSGANIIGTDNSVVLSRKYTSYPWLLGCAANWILRGTSFVYVPSALNPADDPSRGRLGLSRPLLRLPFRPTTGRTSLYADSPSVPSHLPDRVHFASPLHVAWRPP

SEQ ID NO: 47 - protein, 226 aa, Hepatitis B virus
MENITSGFLGPLLVLQAGFFLLTRILTIPQSLDSWWTSLNFLGGTTVCLGQNSQSPTSNHSPTSCPPTCPGYRWMCLRRFIIFLFILLLCLIFLLVLLDYQGMLPVCPLIPGSSTTSTGPCRTCMTTAQGTSMYPSCCCTKPSDGNCTCIPIPSSWAFGKFLWEWASARFSWLSLLVPFVQWFVGLSPTVWLSVIWMMWYWGPSLYSILSPFLPLLPIFFCLWVYI

SEQ ID NO: 48 - protein, 154 aa, Hepatitis B virus
MAARLCCQLDPARDVLCLRPVGAESCGRPFSGSLGTLSSPSPSAVPTDHGAHLSLRGLPVCAFSSAGPCALRFTSARRMETTVNAHRMLPKVLHKRTLGLSAMSTTDLEAYFKDCLFKDWEELGEEIRLKVFVLGGCRHKLVCAPAPCNFFTSA

SEQ ID NO: 49 - protein, 183 aa, Hepatitis B virus
MDIDPYKEFGASVELLSFLPSDFFPSIRDLLDTASALYREALESPEHCSPHHTALRQAILCWGELMNLATWVGSNLEDPASRELVVSYVNVNMGLKIRQLLWFHISCLTFGRETVLEYLVSFGVWIRTPPAYRPPNAPILSTLPETTVVRRRGRSPRRRTPSPRRRRSQSPRRRRSQSRESQC

SEQ ID NO: 50 - protein, 154 aa, Hepatitis B virus
  MOD_RES (66)..(66): Any amino acid
  MOD_RES (118)..(118): Any amino acid
  MOD_RES (127)..(127): Any amino acid
MAARLCCQLDPARDVLCLRPVGAESRGRPLPGPLGALPPASPPVVPSDHGAHLSLRGLPVCAFSSXGPCALRFTSARRMETTVNAHRNLPKVLHKRTLGLSAMSTTDLEAYFKDCVFXEWEELGEEXRLKVFVLGGCRHKLVCSPAPCNFFTSA

SEQ ID NO: 51 - protein, 154 aa, Hepatitis B virus
MAARVCCQLDPARDVLCLRPVGAESRGRPVSGPFGPLPSPSSSAVPADYGAHLSLRGLPVCAFSSAGPCALRFTSARRMETTVNAHQVLPKLLHKRTLGLSAMSTTDLEAYFKDCLFKDWEELGEEIRLKVFVLGGCRHKLVCSPAPCNFFTSA

SEQ ID NO: 52 - protein, 226 aa, Hepatitis B virus
MENTTSGFLGPLLVLQAGFFLLTRNLTIPQSLDSWWTSLNFLGGAPTCPGQNSQSPTSNHSPTSCPPICPGYRWMCLRRFIIFLFILLLCLIFLLVLLDYQGMLPVCPLLPGTSTTSTGPCKTCTIPAQGTSMFPSCCCTKPSDGNCTCIPIPSSWAFARFLWEWASVRFSWLSLLVPFVQWFVGLSPTVWLSVIWMMWYWGPSLYNILSPFLPLLPIFFCLWVYI

SEQ ID NO: 53 - DNA, 3182 bp, Hepatitis B virus
aattccacaacctttcaccaaactctgcaagatcccagagtgagaggcctgtatttccctgctggtggctccagttcaggagcagtaaaccctgttccgactactgcctctcccttatcgtcaatcttctcgaggattggggaccctgcgctgaacatggagaacatcacatcaggattcctaggaccccttctcgtgttacaggcggggtttttcttgttgacaagaatcctcacaataccgcagagtctagactcgtggtggacttctctcaattttctagggggaactaccgtgtgtcttggccaaaattcgcagtccccaacctccaatcactcaccaacctcctgtcctccaacttgtcctggttatcgctggatgtgtctgcggcgttttatcatcttcctcttcatcctgctgctatgcctcatcttcttgttggttcttctggactatcaaggtatgttgcccgtttgtcctctaattccaggatcctcaaccaccagcacgggaccatgccgaacctgcatgactactgctcaaggaacctctatgtatccctcctgttgctgtaccaaaccttcggacggaaattgcacctgtattcccatcccatcatcctgggctttcggaaaattcctatgggagtgggcctcagcccgtttctcctggctcagtttactagtgccatttgttcagtggttcgtagggctttcccccactgtttggctttcagttatatggatgatgtggtattgggggccaagtctgtacagcatcttgagtccctttttaccgctgttaccaattttcttttgtctttgggtatacatttaaaccctaacaaaacaaagagatggggttactctctgaattttatgggttatgtcattggaagttatgggtccttgccacaagaacacatcatacaaaaaatcaaagaatgttttagaaaacttcctattaacaggcctattgattggaaagtatgtcaacgaattgtgggtcttttgggttttgctgccccatttacacaatgtggttatcctgcgttaatgcccttgtatgcatgtattcaatctaagcaggctttcactttctcgccaacttacaaggcctttctgtgtaaacaatacctgaacctttaccccgttgcccggcaacggccaggtctgtgccaagtgtttgctgacgcaacccccactggctggggcttggtcatgggccatcagcgcgtgcgtggaaccttttcggctcctctgccgatccatactgcggaactcctagccgcttgttttgctcgcagcaggtctggagcaaacattatcgggactgataactctgttgtcctctcccgcaaatatacatcgtatccatggctgctaggctgtgctgccaactggatcctgcgcgggacgtcctttgtttacgtcccgtcggcgctgaatcctgcggacgacccttctcggggtcgcttgggactctctcgtccccttctccgtctgccgttccgaccgaccacggggcgcacctctctttacgcggactccccgtctgtgccttctcatctgccggaccgtgtgcacttcgcttcacctctgcacgtcgcatggagaccaccgtgaacgcccaccgaatgttgcccaaggtcttacataagaggactcttggactctctgcaatgtcaacgaccgaccttgaggcatacttcaaagactgtttgtttaaagactgggaggagttgggggaggagattagattaaaggtctttgtactaggaggctgtaggcataaattggtctgcgcaccagcaccatgcaactttttcacctctgcctaatcatctcttgttcatgtcctactgttcaagcctccaagctgtgccttgggtggctttggggcatggacatcgacccttataaagaatttggagctactgtggagttactctcgtttttgccttctgacttctttccttcagtacgagatcttctagataccgcctcagctctgtatcgggaagccttagagtctcctgagcattgttcacctcaccatactgcactcaggcaagcaattctttgctggggggaactaatgactctagctacctgggtgggtgttaatttggaagatccagcatctagagacctagtagtcagttatgtcaacactaatatgggcctaaagttcaggcaactcttgtggtttcacatttcttgtctcacttttggaagagaaaccgttatagagtatttggtgtctttcggagtgtggattcgcactcctccagcttatagaccaccaaatgcccctatcctatcaacacttccggaaactactgttgttagacgacgaggcaggtcccctagaagaagaactccctcgcctcgcagacgaaggtctcaatcgccgcgtcgcagaagatctcaatctcgggaacctcaatgttagtattccttggactcataaggtggggaactttactggtctttattcttctactgtacctgtctttaatcctcattggaaaacaccatcttttcctaatatacatttacaccaagacattatcaaaaaatgtgaacagtttgtaggcccacttacagttaatgagaaaagaagattgcaattgattatgcctgctaggttttatccaaaggttaccaaatatttaccattggataagggtattaaaccttattatccagaacatctagttaatcattacttccaaactagacactatttacacactctatggaaggcgggtatattatataagagagaaacaacacatagcgcctcattttgtgggtcaccatattcttgggaacaagatctacagcatggggcagaatctttccaccagcaatcctctgggattctttcccgaccaccagttggatccagccttcagagcaaacacagcaaatccagattgggacttcaatcccaacaaggacacctggccagacgccaacaaggtaggagctggagcattcgggctgggtttcaccccaccgcacggaggccttttggggtggagccctcaggctcagggcatactacaaactttgccagcaaatccgcctcctgcctccaccaatcgccagacaggaaggcagcctaccccgctgtctccacctttgagaaacactcatcctcaggccatgcagtgg

SEQ ID NO: 54 - DNA, 306 bp, Artificial Sequence
  Description of Artificial Sequence: Synthetic polynucleotide
tgcctgtcatacgaaaccgagatactgacagtagaatatggccttctgccaatcgggaagattgtggagaaacggatagaatgcacagtttactctgtcgataacaatggtaacatttatactcagccagttgcccagtggcacgaccggggagagcaggaagtattcgaatactgtctggaggatggaagtctcattagggccactaaggaccacaaatttatgacagtcgatggccagatgctgcctatagacgaaatctttgagcgagagttggacctcatgcgagttgacaaccttcctaat

SEQ ID NO: 55 - protein, 102 aa, Artificial Sequence
  Description of Artificial Sequence: Synthetic polypeptide
CLSYETEILTVEYGLLPIGKIVEKRIECTVYSVDNNGNIYTQPVAQWHDRGEQEVFEYCLEDGSLIRATKDHKFMTVDGQMLPIDEIFERELDLMRVDNLPN

SEQ ID NO: 56 - DNA, 108 bp, Artificial Sequence
  Description of Artificial Sequence: Synthetic polynucleotide
atgatcaagatagctacaaggaagtatcttggcaaacaaaacgtttatgatattggagtcgaaagagatcacaactttgctctgaagaacggattcatagcttctaat

SEQ ID NO: 57 - protein, 36 aa, Artificial Sequence
  Description of Artificial Sequence: Synthetic polypeptide
MIKIATRKYLGKQNVYDIGVERDHNFALKNGFIASN

SEQ ID NO: 58 - DNA, 303 bp, Artificial Sequence
  Description of Artificial Sequence: Synthetic polynucleotide
tgcctgtcttatgataccgagatacttaccgttgaatatggcttcttgcctattggaaagattgtcgaagagagaattgaatgcacagtatatactgtagacaagaatggtttcgtttacacacagcccattgctcaatggcacaatcgcggcgaacaagaagtatttgagtactgtctcgaggatggaagcatcatacgagcaactaaagatcataaattcatgaccactgacgggcagatgttgccaatagatgagatattcgagcggggcttggatctcaaacaagtggatggattgcca

SEQ ID NO: 59 - protein, 101 aa, Artificial Sequence
  Description of Artificial Sequence: Synthetic polypeptide
CLSYDTEILTVEYGFLPIGKIVEERIECTVYTVDKNGFVYTQPIAQWHNRGEQEVFEYCLEDGSIIRATKDHKFMTTDGQMLPIDEIFERGLDLKQVDGLP

SEQ ID NO: 60 - DNA, 159 bp, Artificial Sequence
  Description of Artificial Sequence: Synthetic polynucleotide
atgaagaggactgccgatggatcagagtttgaatctcccaagaagaagaggaaagtaaagataatatctcgaaaaagtcttggtacccaaaatgtctatgatattggagtggagaaagatcacaacttccttctcaagaacggtctcgtagccagcaac

SEQ ID NO: 61 - protein, 53 aa, Artificial Sequence
  Description of Artificial Sequence: Synthetic polypeptide
MKRTADGSEFESPKKKRKVKIISRKSLGTQNVYDIGVEKDHNFLLKNGLVASN

SEQ ID NO: 62 - protein, 24 aa, Artificial Sequence
  Description of Artificial Sequence: Synthetic peptide
SGGSSGSETPGTSESATPESSGGS

SEQ ID NO: 63 - protein, 32 aa, Artificial Sequence
  Description of Artificial Sequence: Synthetic polypeptide
SGGSSGGSSGSETPGTSESATPESSGGSSGGS

SEQ ID NO: 64 - protein, 104 aa, Artificial Sequence
  Description of Artificial Sequence: Synthetic polypeptide
GGSGGSPGSPAGSPTSTEEGTSESATPESGPGTSTEPSEGSAPGSPAGSPTSTEEGTSTEPSEGSAPGTSTEPSEGSAPGTSESATPESGPGSEPATSGGSGGS

SEQ ID NO: 65 - protein, 16 aa, Artificial Sequence
  Description of Artificial Sequence: Synthetic peptide
SGSETPGTSESATPES

SEQ ID NO: 66 - protein, 24 aa, Artificial Sequence
  Description of Artificial Sequence: Synthetic peptide
SGGSSGGSSGSETPGTSESATPES

SEQ ID NO: 67 - protein, 40 aa, Artificial Sequence
  Description of Artificial Sequence: Synthetic polypeptide
SGGSSGGSSGSETPGTSESATPESSGGSSGGSSGGSSGGS

SEQ ID NO: 68 - protein, 64 aa, Artificial Sequence
  Description of Artificial Sequence: Synthetic polypeptide
SGGSSGGSSGSETPGTSESATPESSGGSSGGSSGGSSGGSSGSETPGTSESATPESSGGSSGGS

SEQ ID NO: 69 - protein, 92 aa, Artificial Sequence
  Description of Artificial Sequence: Synthetic polypeptide
PGSPAGSPTSTEEGTSESATPESGPGTSTEPSEGSAPGSPAGSPTSTEEGTSTEPSEGSAPGTSTEPSEGSAPGTSESATPESGPGSEPATS

SEQ ID NO: 70 - protein, 18 aa, Artificial Sequence
  Description of Artificial Sequence: Synthetic peptide
KRTADGSEFESPKKKRKV

SEQ ID NO: 71 - protein, 16 aa, Artificial Sequence
  Description of Artificial Sequence: Synthetic peptide
KRPAATKKAGQAKKKK

SEQ ID NO: 72 - protein, 17 aa, Artificial Sequence
  Description of Artificial Sequence: Synthetic peptide
KKTELQTTNAENKTKKL

SEQ ID NO: 73 - protein, 19 aa, Artificial Sequence
  Description of Artificial Sequence: Synthetic peptide
KRGINDRNFWRGENGRKTR

SEQ ID NO: 74 - protein, 16 aa, Artificial Sequence
  Description of Artificial Sequence: Synthetic peptide
RKSGKIAAIVVKRPRK

SEQ ID NO: 75 - protein, 7 aa, Artificial Sequence
  Description of Artificial Sequence: Synthetic peptide
PKKKRKV

SEQ ID NO: 76 - protein, 30 aa, Artificial Sequence
  Description of Artificial Sequence: Synthetic polypeptide
MDSLLMNRRKFLYQFKNVRWAKGRRETYLC

SEQ ID NO: 77 - protein, 84 aa, Bacillus phage PBS2
MTNLSDIIEKETGKQLVIQESILMLPEEVEEVIGNKPESDILVHTAYDESTDENVMLLTSDAPEYKPWALVIQDSNGENKIKML

SEQ ID NO: 78 - protein, 1368 aa, Streptococcus pyogenes [sequence omitted]

SEQ ID NO: 79 - RNA, 80 nt, Artificial Sequence
  Description of Artificial Sequence: Synthetic oligonucleotide
guuuuagagcuagaaauagcaaguuaaaauaaggcuaguccguuaucaacuugaaaaaguggcaccgagucggugcuuuu

SEQ ID NO: 80 - RNA, 125 nt, Artificial Sequence
  Description of Artificial Sequence: Synthetic polynucleotide
guuuuuguacucucaagauuuaaguaacuguacaacgaaacuuacacaguuacuuaaaucuugcagaagcuacaaagauaaggcuucaugccgaaaucaacacccugucauuuuauggcagggug

SEQ ID NO: 81 - RNA, 76 nt, Artificial Sequence
  Description of Artificial Sequence: Synthetic oligonucleotide
guuuuagagcuagaaauagcaaguuaaaauaaggcuaguccguuaucaacuugaaaaaguggcaccgagucggugc

SEQ ID NO: 82 - RNA, 84 nt, Artificial Sequence
  Description of Artificial Sequence: Synthetic oligonucleotide
guuuuaguacucuguaaugaaaauuacagaaucuacuaaaacaaggcaaaaugccguguuuaucucgucaacuuguuggcgaga

SEQ ID NO: 83 - DNA, 97 bp, Artificial Sequence
  Description of Artificial Sequence: Synthetic oligonucleotide
  Description of Combined DNA/RNA Molecule: Synthetic oligonucleotide
guucugtcuuuuggucaggacaaccgucuagcuauaagugcugcagggugugagaaacuccuauugcuggacgaugucucuuacgaggcauuagcac

SEQ ID NO: 84 - RNA, 88 nt, Artificial Sequence
  Description of Artificial Sequence: Synthetic oligonucleotide
gaccuauagggucaaugaaucugugcgugugccauaaguaauuaaaaauuacccaccacaggagcaccugaaaacaggugcuuggcac

SEQ ID NO: 85 - DNA, 4104 bp, Streptococcus pyogenes
atggataagaaatactcaataggcttagatatcggcacaaatagcgtcggatgggcggtgatcactgatgattataaggttccgtctaaaaagttcaaggttctgggaaatacagaccgccacagtatcaaaaaaaatcttataggggctcttttatttggcagtggagagacagcggaagcgactcgtctcaaacggacagctcgtagaaggtatacacgtcggaagaatcgtatttgttatctacaggagattttttcaaatgagatggcgaaagtagatgatagtttctttcatcgacttgaagagtcttttttggtggaagaagacaagaagcatgaacgtcatcctatttttggaaatatagtagatgaagttgcttatcatgagaaatatccaactatctatcatctgcgaaaaaaattggcagattctactgataaagcggatttgcgcttaatctatttggccttagcgcatatgattaagtttcgtggtcattttttgattgagggagatttaaatcctgataatagtgatgtggacaaactatttatccagttggtacaaatctacaatcaattatttgaagaaaaccctattaacgcaagtagagtagatgctaaagcgattctttctgcacgattgagtaaatcaagacgattagaaaatctcattgctcagctccccggtgagaagagaaatggcttgtttgggaatctcattgctttgtcattgggattgacccctaattttaaatcaaattttgatttggcagaagatgctaaattacagctttcaaaagatacttacgatgatgatttagataatttattggcgcaaattggagatcaatatgctgatttgtttttggcagctaagaatttatcagatgctattttactttcagatatcctaagagtaaatagtgaaataactaaggctcccctatcagcttcaatgattaagcgctacgatgaacatcatcaagacttgactcttttaaaagctttagttcgacaacaacttccagaaaagtataaagaaatcttttttgatcaatcaaaaaacggatatgcaggttatattgatgggggagctagccaagaagaattttataaatttatcaaaccaattttagaaaaaatggatggtactgaggaattattggtgaaactaaatcgtgaagatttgctgcgcaagcaacggacctttgacaacggctctattccccatcaaattcacttgggtgagctgcatgctattttgagaagacaagaagacttttatccatttttaaaagacaatcgtgagaagattgaaaaaatcttgacttttcgaattccttattatgttggtccattggcgcgtggcaatagtcgttttgcatggatgactcggaagtctgaagaaacaattaccccatggaattttgaagaagttgtcgataaaggtgcttcagctcaatcatttattgaacgcatgacaaactttgataaaaatcttccaaatgaaaaagtactaccaaaacatagtttgctttatgagtattttacggtttataacgaattgacaaaggtcaaatatgttactgagggaatgcgaaaaccagcatttctttcaggtgaacagaagaaagccattgttgatttactcttcaaaacaaatcgaaaagtaaccgttaagcaattaaaagaagattatttcaaaaaaatagaatgttttgatagtgttgaaatttcaggagttgaagatagatttaatgcttcattaggcgcctaccatgatttgctaaaaattattaaagataaagattttttggataatgaagaaaatgaagatatcttagaggatattgttttaacattgaccttatttgaagatagggggatgattgaggaaagacttaaaacatatgctcacctctttgatgataaggtgatgaaacagcttaaacgtcgccgttatactggttggggacgtttgtctcgaaaattgattaatggtattagggataagcaatctggcaaaacaatattagattttttgaaatcagatggttttgccaatcgcaattttatgcagctgatccatgatgatagtttgacatttaaagaagatattcaaaaagcacaggtgtctggacaaggccatagtttacatgaacagattgctaacttagctggcagtcctgctattaaaaaaggtattttacagactgtaaaaattgttgatgaactggtcaaagtaatggggcataagccagaaaatatcgttattgaaatggcacgtgaaaatcagacaactcaaaagggccagaaaaattcgcgagagcgtatgaaacgaatcgaagaaggtatcaaagaattaggaagtcagattcttaaagagcatcctgttgaaaatactcaattgcaaaatgaaaagctctatctctattatctacaaaatggaagagacatgtatgtggaccaagaattagatattaatcgtttaagtgattatgatgtcgatcacattgttccacaaagtttcattaaagacgattcaatagacaataaggtactaacgcgttctgataaaaatcgtggtaaatcggataacgttccaagtgaagaagtagtcaaaaagatgaaaaactattggagacaacttctaaacgccaagttaatcactcaacgtaagtttgataatttaacgaaagctgaacgtggaggtttgagtgaacttgataaagctggttttatcaaacgccaattggttgaaactcgccaaatcactaagcatgtggcacaaattttggatagtcgcatgaatactaaatacgatgaaaatgataaacttattcgagaggttaaagtgattaccttaaaatctaaattagtttctgacttccgaaaagatttccaattctataaagtacgtgagattaacaattaccatcatgcccatgatgcgtatctaaatgccgtcgttggaactgctttgattaagaaatatccaaaacttgaatcggagtttgtctatggtgattataaagtttatgatgttcgtaaaatgattgctaagtctgagcaagaaataggcaaagcaaccgcaaaatatttcttttactctaatatcatgaacttcttcaaaacagaaattacacttgcaaatggagagattcgcaaacgccctctaatcgaaactaatggggaaactggagaaattgtctgggataaagggcgagattttgccacagtgcgcaaagtattgtccatgccccaagtcaatattgtcaagaaaacagaagtacagacaggcggattctccaaggagtcaattttaccaaaaagaaattcggacaagcttattgctcgtaaaaaagactgggatccaaaaaaatatggtggttttgatagtccaacggtagcttattcagtcctagtggttgctaaggtggaaaaagggaaatcgaagaagttaaaatccgttaaagagttactagggatcacaattatggaaagaagttcctttgaaaaaaatccgattgactttttagaagctaaaggatataaggaagttaaaaaagacttaatcattaaactacctaaatatagtctttttgagttagaaaacggtcgtaaacggatgctggctagtgccggagaattacaaaaaggaaatgagctggctctgccaagcaaatatgtgaattttttatatttagctagtcattatgaaaagttgaagggtagtccagaagataacgaacaaaaacaattgtttgtggagcagcataagcattatttagatgagattattgagcaaatcagtgaattttctaagcgtgttattttagcagatgccaatttagataaagttcttagtgcatataacaaacatagagacaaaccaatacgtgaacaagcagaaaatattattcatttatttacgttgacgaatcttggagctcccgctgcttttaaatattttgatacaacaattgatcgtaaacgatatacgtctacaaaagaagttttagatgccactcttatccatcaatccatcactggtctttatgaaacacgcattgatttgagtcagctaggaggtgactga

SEQ ID NO: 86 - DNA, 4212 bp, Streptococcus pyogenes
atggataaaaagtattctattggtttagacatcggcactaattccgttggatgggctgtcataaccgatgaatacaaagtaccttcaaagaaatttaaggtgttggggaacacagaccgtcattcgattaaaaagaatcttatcggtgccctcctattcgatagtggcgaaacggcagaggcgactcgcctgaaacgaaccgctcggagaaggtatacacgtcgcaagaaccgaatatgttacttacaagaaatttttagcaatgagatggccaaagttgacgattctttctttcaccgtttggaagagtccttccttgtcgaagaggacaagaaacatgaacggcaccccatctttggaaacatagtagatgaggtggcatatcatgaaaagtacccaacgatttatcacctcagaaaaaagctagttgactcaactgataaagcggacctgaggttaatctacttggctcttgcccatatgataaagttccgtgggcactttctcattgagggtgatctaaatccggacaactcggatgtcgacaaactgttcatccagttagtacaaacctataatcagttgtttgaagagaaccctataaatgcaagtggcgtggatgcgaaggctattcttagcgcccgcctctctaaatcccgacggctagaaaacctgatcgcacaattacccggagagaagaaaaatgggttgttcggtaaccttatagcgctctcactaggcctgacaccaaattttaagtcgaacttcgacttagctgaagatgccaaattgcagcttagtaaggacacgtacgatgacgatctcgacaatctactggcacaaattggagatcagtatgcggacttatttttggctgccaaaaaccttagcgatgcaatcctcctatctgacatactgagagttaatactgagattaccaaggcgccgttatccgcttcaatgatcaaaaggtacgatgaacatcaccaagacttgacacttctcaaggccctagtccgtcagcaactgcctgagaaatataaggaaatattctttgatcagtcgaaaaacgggtacgcaggttatattgacggcggagcgagtcaagaggaattctacaagtttatcaaacccatattagagaagatggatgggacggaagagttgcttgtaaaactcaatcgcgaagatctactgcgaaagcagcggactttcgacaacggtagcattccacatcaaatccacttaggcgaattgcatgctatacttagaaggcaggaggatttttatccgttcctcaaagacaatcgtgaaaagattgagaaaatcctaacctttcgcataccttactatgtgggacccctggcccgagggaactctcggttcgcatggatgacaagaaagtccgaagaaacgattactccatggaattttgaggaagttgtcgataaaggtgcgtcagctcaatcgttcatcgagaggatgaccaactttgacaagaatttaccgaacgaaaaagtattgcctaagcacagtttactttacgagtatttcacagtgtacaatgaactcacgaaagttaagtatgtcactgagggcatgcgtaaacccgcctttctaagcggagaacagaagaaagcaatagtagatctgttattcaagaccaaccgcaaagtgacagttaagcaattgaaagaggactactttaagaaaattgaatgcttcgattctgtcgagatctccggggtagaagatcgatttaatgcgtcacttggtacgtatcatgacctcctaaagataattaaagataaggacttcctggataacgaagagaatgaagatatcttagaagatatagtgttgactcttaccctctttgaagatcgggaaatgattgaggaaagactaaaaacatacgctcacctgttcgacgataaggttatgaaacagttaaagaggcgtcgctatacgggctggggacgattgtcgcggaaacttatcaacgggataagagacaagcaaagtggtaaaactattctcgattttctaaagagcgacggcttcgccaataggaactttatgcagctgatccatgatgactctttaaccttcaaagaggatatacaaaaggcacaggtttccggacaaggggactcattgcacgaacatattgcgaatcttgctggttcgccagccatcaaaaagggcatactccagacagtcaaagtagtggatgagctagttaaggtcatgggacgtcacaaaccggaaaacattgtaatcgagatggcacgcgaaaatcaaacgactcagaaggggcaaaaaaacagtcgagagcggatgaagagaatagaagagggtattaaagaactgggcagccagatcttaaaggagcatcctgtggaaaatacccaattgcagaacgagaaactttacctctattacctacaaaatggaagggacatgtatgttgatcaggaactggacataaaccgtttatctgattacgacgtcgatcacattgtaccccaatcctttttgaaggacgattcaatcgacaataaagtgcttacacgctcggataagaaccgagggaaaagtgacaatgttccaagcgaggaagtcgtaaagaaaatgaagaactattggcggcagctcctaaatgcgaaactgataacgcaaagaaagttcgataacttaactaaagctgagaggggtggcttgtctgaacttgacaaggccggatttattaaacgtcagctcgtggaaacccgccaaatcacaaagcatgttgcacagatactagattcccgaatgaatacgaaatacgacgagaacgataagctgattcgggaagtcaaagtaatcactttaaagtcaaaattggtgtcggacttcagaaaggattttcaattctataaagttagggagataaataactaccaccatgcgcacgacgcttatcttaatgccgtcgtagggaccgcactcattaagaaatacccgaagctagaaagtgagtttgtgtatggtgattacaaagtttatgacgtccgtaagatgatcgcgaaaagcgaacaggagataggcaaggctacagccaaatacttcttttattctaacattatgaatttctttaagacggaaatcactctggcaaacggagagatacgcaaacgacctttaattgaaaccaatggggagacaggtgaaatcgtatgggataagggccgggacttcgcgacggtgagaaaagttttgtccatgccccaagtcaacatagtaaagaaaactgaggtgcagaccggagggttttcaaaggaatcgattcttccaaaaaggaatagtgataagctcatcgctcgtaaaaaggactgggacccgaaaaagtacggtggcttcgatagccctacagttgcctattctgtcctagtagtggcaaaagttgagaagggaaaatccaagaaactgaagtcagtcaaagaattattggggataacgattatggagcgctcgtcttttgaaaagaaccccatcgacttccttgaggcgaaaggttacaaggaagtaaaaaaggatctcataattaaactaccaaagtatagtctgtttgagttagaaaatggccgaaaacggatgttggctagcgccggagagcttcaaaaggggaacgaactcgcactaccgtctaaatacgtgaatttcctgtatttagcgtcccattacgagaagttgaaaggttcacctgaagataacgaacagaagcaactttttgttgagcagcacaaacattatctcgacgaaatcatagagcaaatttcggaattcagtaagagagtcatcctagctgatgccaatctggacaaagtattaagcgcatacaacaagcacagggataaacccatacgtgagcaggcggaaaatattatccatttgtttactcttaccaacctcggcgctccagccgcattcaagtattttgacacaacgatagatcgcaaacgatacacttctaccaaggaggtgctagacgcgacactgattcaccaatccatcacgggattatatgaaactcggatagatttgtcacagcttgggggtgacggatcccccaagaagaagaggaaagtctcgagcgactacaaagaccatgacggtgattataaagatcatgacatcgattacaaggatgacgatgacaaggctgcagga

SEQ ID NO: 87 - protein, 1368 aa, Streptococcus pyogenes
MDKKYSIGLAIGTNSVGWAVITDEYKVPSKKFKVLGNTDRHSIKKNLIGALLFDSGETAEATRLKRTARRRYTRRKNRICYLQEIFSNEMAKVDDSFFHRLEESFLVEEDKKHERHPIFGNIVDEVAYHEKYPTIYHLRKKLVDSTDKADLRLIYLALAHMIKFRGHFLIEGDLNPDNSDVDKLFIQLVQTYNQLFEENPINASGVDAKAILSARLSKSRRLENLIAQLPGEKKNGLFGNLIALSLGLTPNFKSNFDLAEDAKLQLSKDTYDDDLDNLLAQIGDQYADLFLAAKNLSDAILLSDILRVNTEITKAPLSASMIKRYDEHHQDLTLLKALVRQQLPEKYKEIFFDQSKNGYAGYIDGGASQEEFYKFIKPILEKMDGTEELLVKLNREDLLRKQRTFDNGSIPHQIHLGELHAILRRQEDFYPFLKDNREKIEKILTFRIPYYVGPLARGNSRFAWMTRKSEETITPWNFEEVVDKGASAQSFIERMTNFDKNLPNEKVLPKHSLLYEYFTVYNELTKVKYVTEGMRKPAFLSGEQKKAIVDLLFKTNRKVTVKQLKEDYFKKIECFDSVEISGVEDRFNASLGTYHDLLKIIKDKDFLDNEENEDILEDIVLTLTLFEDREMIEERLKTYAHLFDDKVMKQLKRRRYTGWGRLSRKLINGIRDKQSGKTILDFLKSDGFANRNFMQLIHDDSLTFKEDIQKAQVSGQGDSLHEHIANLAGSPAIKKGILQTVKVVDELVKVMGRHKPENIVIEMARENQTTQKGQKNSRERMKRIEEGIKELGSQILKEHPVENTQLQNEKLYLYYLQNGRDMYVDQELDINRLSDYDVDHIVPQSFLKDDSIDNKVLTRSDKNRGKSDNVPSEEVVKKMKNYWRQLLNAKLITQRKFDNLTKAERGGLSELDKAGFIKRQLVETRQITKHVAQILDSRMNTKYDENDKLIREVKVITLKSKLVSDFRKDFQFYKVREINNYHHAHDAYLNAVVGTALIKKYPKLESEFVYGDYKVYDVRKMIAKSEQEIGKATAKYFFYSNIMNFFKTEITLANGEIRKRPLIETNGETGEIVWDKGRDFATVRKVLSMPQVNIVKKTEVQTGGFSKESILPKRNSDKLIARKKDWDPKKYGGFDSPTVAYSVLVVAKVEKGKSKKLKSVKELLGITIMERSSFEKNPIDFLEAKGYKEVKKDLIIKLPKYSLFELENGRKRMLASAGELQKGNELALPSKYVNFLYLASHYEKLKGSPEDNEQKQLFVEQHKHYLDEIIEQISEFSKRVILADANLDKVLSAYNKHRDKPIREQAENIIHLFTLTNLGAPAAFKYFDTTIDRKRYTSTKEVLDATLIHQSITGLYETRIDLSQLGGD

SEQ ID NO: 88 - DNA, 4107 bp, Streptococcus pyogenes
atggataagaaatactcaataggcttagatatcggcacaaatagcgtcggatgggcggtgatcactgatgaatataaggttccgtctaaaaagttcaaggttctgggaaatacagaccgccacagtatcaaaaaaaatcttataggggctcttttatttgacagtggagagacagcggaagcgactcgtctcaaacggacagctcgtagaaggtatacacgtcggaagaatcgtatttgttatctacaggagattttttcaaatgagatggcgaaagtagatgatagtttctttcatcgacttgaagagtcttttttggtggaagaagacaagaagcatgaacgtcatcctatttttggaaatatagtagatgaagttgcttatcatgagaaatatccaactatctatcatctgcgaaaaaaattggtagattctactgataaagcggatttgcgcttaatctatttggccttagcgcatatgattaagtttcgtggtcattttttgattgagggagatttaaatcctgataatagtgatgtggacaaactatttatccagttggtacaaacctacaatcaattatttgaagaaaaccctattaacgcaagtggagtagatgctaaagcgattctttctgcacgattgagtaaatcaagacgattagaaaatctcattgctcagctccccggtgagaagaaaaatggcttatttgggaatctcattgctttgtcattgggtttgacccctaattttaaatcaaattttgatttggcagaagatgctaaattacagctttcaaaagatacttacgatgatgatttagataatttattggcgcaaattggagatcaatatgctgatttgtttttggcagctaagaatttatcagatgctattttactttcagatatcctaagagtaaatactgaaataactaaggctcccctatcagcttcaatgattaaacgctacgatgaacatcatcaagacttgactcttttaaaagctttagttcgacaacaacttccagaaaagtataaagaaatcttttttgatcaatcaaaaaacggatatgcaggttatattgatgggggagctagccaagaagaattttataaatttatcaaaccaattttagaaaaaatggatggtactgaggaattattggtgaaactaaatcgtgaagatttgctgcgcaagcaacggacctttgacaacggctctattccccatcaaattcacttgggtgagctgcatgctattttgagaagacaagaagacttttatccatttttaaaagacaatcgtgagaagattgaaaaaatcttgacttttcgaattccttattatgttggtccattggcgcgtggcaatagtcgttttgcatggatgactcggaagtctgaagaaacaattaccccatggaattttgaagaagttgtcgataaaggtgcttcagctcaatcatttattgaacgcatgacaaactttgataaaaatcttccaaatgaaaaagtactaccaaaacatagtttgctttatgagtattttacggtttataacgaattgacaaaggtcaaatatgttactgaaggaatgcgaaaaccagcatttctttcaggtgaacagaagaaagccattgttgatttactcttcaaaacaaatcgaaaagtaaccgttaagcaattaaaagaagattatttcaaaaaaatagaatgttttgatagtgttgaaatttcaggagttgaagatagatttaatgcttcattaggtacctaccatgatttgctaaaaattattaaagataaagattttttggataatgaagaaaatgaagatatcttagaggatattgttttaacattgaccttatttgaagatagggagatgattgaggaaagacttaaaacatatgctcacctctttgatgataaggtgatgaaacagcttaaacgtcgccgttatactggttggggacgtttgtctcgaaaattgattaatggtattagggataagcaatctggcaaaacaatattagattttttgaaatcagatggttttgccaatcgcaattttatgcagctgatccatgatgatagtttgacatttaaagaagacattcaaaaagcacaagtgtctggacaaggcgatagtttacatgaacatattgcaaatttagctggtagccctgctattaaaaaaggtattttacagactgtaaaagttgttgatgaattggtcaaagtaatggggcggcataagccagaaaatatcgttattgaaatggcacgtgaaaatcagacaactcaaaagggccagaaaaattcgcgagagcgtatgaaacgaatcgaagaaggtatcaaagaattaggaagtcagattcttaaagagcatcctgttgaaaatactcaattgcaaaatgaaaagctctatctctattatctccaaaatggaagagacatgtatgtggaccaagaattagatattaatcgtttaagtgattatgatgtcgatcacattgttccacaaagtttccttaaagacgattcaatagacaataaggtcttaacgcgttctgataaaaatcgtggtaaatcggataacgttccaagtgaagaagtagtcaaaaagatgaaaaactattggagacaacttctaaacgccaagttaatcactcaacgtaagtttgataatttaacgaaagctgaacgtggaggtttgagtgaacttgataaagctggttttatcaaacgccaattggttgaaactcgccaaatcactaagcatgtggcacaaattttggatagtcgcatgaatactaaatacgatgaaaatgataaacttattcgagaggttaaagtgattaccttaaaatctaaattagtttctgacttccgaaaagatttccaattctataaagtacgtgagattaacaattaccatcatgcccatgatgcgtatctaaatgccgtcgttggaactgctttgattaagaaatatccaaaacttgaatcggagtttgtctatggtgattataaagtttatgatgttcgtaaaatgattgctaagtctgagcaagaaataggcaaagcaaccgcaaaatatttcttttactctaatatcatgaacttcttcaaaacagaaattacacttgcaaatggagagattcgcaaacgccctctaatcgaaactaatggggaaactggagaaattgtctgggataaagggcgagattttgccacagtgcgcaaagtattgtccatgccccaagtcaatattgtcaagaaaacagaagtacagacaggcggattctccaaggagtcaattttaccaaaaagaaattcggacaagcttattgctcgtaaaaaagactgggatccaaaaaaatatggtggttttgatagtccaacggtagcttattcagtcctagtggttgctaaggtggaaaaagggaaatcgaagaagttaaaatccgttaaagagttactagggatcacaattatggaaagaagttcctttgaaaaaaatccgattgactttttagaagctaaaggatataaggaagttaaaaaagacttaatcattaaactacctaaatatagtctttttgagttagaaaacggtcgtaaacggatgctggctagtgccggagaattacaaaaaggaaatgagctggctctgccaagcaaatatgtgaattttttatatttagctagtcattatgaaaagttgaagggtagtccagaagataacgaacaaaaacaattgtttgtggagcagcataagcattatttagatgagattattgagcaaatcagtgaattttctaagcgtgttattttagcagatgccaatttagataaagttcttagtgcatataacaaacatagagacaaaccaatacgtgaacaagcagaaaatattattcatttatttacgttgacgaatcttggagctcccgctgcttttaaatattttgatacaacaattgatcgtaaacgatatacgtctacaaaagaagttttagatgccactcttatccatcaatccatcactggtctttatgaaacacgcattgatttgagtcagctaggaggtgactga

SEQ ID NO: 89 - protein, 1368 aa, Artificial Sequence
  Description of Artificial Sequence: Synthetic polypeptide
MDKKYSIGLAIGTNSVGWAVITDEYKVPSKKFKVLGNTDRHSIKKNLIGALLFDSGETAEATRLKRTARRRYTRRKNRICYLQEIFSNEMAKVDDSFFHRLEESFLVEEDKKHERHPIFGNIVDEVAYHEKYPTIYHLRKKLVDSTDKADLRLIYLALAHMIKFRGHFLIEGDLNPDNSDVDKLFIQLVQTYNQLFEENPINASGVDAKAILSARLSKSRRLENLIAQLPGEKKNGLFGNLIALSLGLTPNFKSNFDLAEDAKLQLSKDTYDDDLDNLLAQIGDQYADLFLAAKNLSDAILLSDILRVNTEITKAPLSASMIKRYDEHHQDLTLLKALVRQQLPEKYKEIFFDQSKNGYAGYIDGGASQEEFYKFIKPILEKMDGTEELLVKLNREDLLRKQRTFDNGSIPHQIHLGELHAILRRQEDFYPFLKDNREKIEKILTFRIPYYVGPLARGNSRFAWMTRKSEETITPWNFEEVVDKGASAQSFIERMTNFDKNLPNEKVLPKHSLLYEYFTVYNELTKVKYVTEGMRKPAFLSGEQKKAIVDLLFKTNRKVTVKQLKEDYFKKIECFDSVEISGVEDRFNASLGTYHDLLKIIKDKDFLDNEENEDILEDIVLTLTLFEDREMIEERLKTYAHLFDDKVMKQLKRRRYTGWGRLSRKLINGIRDKQSGKTILDFLKSDGFANRNFMQLIHDDSLTFKEDIQKAQVSGQGDSLHEHIANLAGSPAIKKGILQTVKVVDELVKVMGRHKPENIVIEMARENQTTQKGQKNSRERMKRIEEGIKELGSQILKEHPVENTQLQNEKLYLYYLQNGRDMYVDQELDINRLSDYDVDAIVPQSFLKDDSIDNKVLTRSDKNRGKSDNVPSEEVVKKMKNYWRQLLNAKLITQRKFDNLTKAERGGLSELDKAGFIKRQLVETRQITKHVAQILDSRMNTKYDENDKLIREVKVITLKSKLVSDFRKDFQFYKVREINNYHHAHDAYLNAVVGTALIKKYPKLESEFVYGDYKVYDVRKMIAKSEQEIGKATAKYFFYSNIMNFFKTEITLANGEIRKRPLIETNGETGEIVWDKGRDFATVRKVLSMPQVNIVKKTEVQTGGFSKESILPKRNSDKLIARKKDWDPKKYGGFDSPTVAYSVLVVAKVEKGKSKKLKSVKELLGITIMERSSFEKNPIDFLEAKGYKEVKKDLIIKLPKYSLFELENGRKRMLASAGELQKGNELALPSKYVNFLYLASHYEKLKGSPEDNEQKQLFVEQHKHYLDEIIEQISEFSKRVILADANLDKVLSAYNKHRDKPIREQAENIIHLFTLTNLGAPAAFKYFDTTIDRKRYTSTKEVLDATLIHQSITGLYETRIDLSQLGGD

SEQ ID NO: 90 - protein, 345 aa, Sulfolobus islandicus
MEVPLYNIFGDNYIIQVATEAENSTIYNNKVEIDDEELRNVLNLAYKIAKNNEDAAAERRGKAKKKKGEEGETTTSNIILPLSGNDKNPWTETLKCYNFPTTVALSEVFKNFSQVKECEEVSAPSFVKPEFYEFGRSPGMVERTRRVKLEVEPHYLIIAAAGWVLTRLGKAKVSEGDYVGVNVFTPTRGILYSLIQNVNGIVPGIKPETAFGLWIARKVVSSVTNPNVSVVRIYTISDAVGQNPTTINGGFSIDLTKLLEKRYLLSERLEAIARNALSISSNMRERYIVLANYIYEYLTGSKRLEDLLYFANRDLIMNLNSDDGKVRDLKLISAYVNGELIRGEG

SEQ ID NO: 91 - protein, 345 aa, Sulfolobus islandicus
MEVPLYNIFGDNYIIQVATEAENSTIYNNKVEIDDEELRNVLNLAYKIAKNNEDAAAERRGKAKKKKGEEGETTTSNIILPLSGNDKNPWTETLKCYNFPTTVALSEVFKNFSQVKECEEVSAPSFVKPEFYKFGRSPGMVERTRRVKLEVEPHYLIMAAAGWVLTRLGKAKVSEGDYVGVNVFTPTRGILYSLIQNVNGIVPGIKPETAFGLWIARKVVSSVTNPNVSVVSIYTISDAVGQNPTTINGGFSIDLTKLLEKRDLLSERLEAIARNALSISSNMRERYIVLANYIYEYLTGSKRLEDLLYFANRDLIMNLNSDDGKVRDLKLISAYVNGELIRGEG

SEQ ID NO: 92 - protein, 987 aa, Unknown
  Description of Unknown: Deltaproteobacteria CasX sequence
MEKRINKIRKKLSADNATKPVSRSGPMKTLLVRVMTDDLKKRLEKRRKKPEVMPQVISNNAANNLRMLLDDYTKMKEAILQVYWQEFKDDHVGLMCKFAQPASKKIDQNKLKPEMDEKGNLTTAGFACSQCGQPLFVYKLEQVSEKGKAYTNYFGRCNVAEHEKLILLAQLKPVKDSDEAVTYSLGKFGQRALDFYSIHVTKESTHPVKPLAQIAGNRYASGPVGKALSDACMGTIASFLSKYQDIIIEHQKVVKGNQKRLESLRELAGKENLEYPSVTLPPQPHTKEGVDFAYNEVIARVRMWVNLNLWQKLKLSRDDAKPLLRLKGFPSFPVVERRENEVDWWNTINEVKKLIDAKRDMGRVFWSGVTAEKRNTILEGYNYLPNENDHKKREGSLENPKKPAKRQFGDLLLYLEKKYAGDWGKVFDEAWERIDKKIAGLTSHIEREEARNAEDAQSKAVLTDWLRAKASFVLERLKEMDEKEFYACEIQLQKWYGDLRGNPFAVEAENRVVDISGFSIGSDGHSIQYRNLLAWKYLENGKREFYLLMNYGKKGRIRFTDGTDIKKSGKWQGLLYGGGKAKVIDLTFDPDDEQLIILPLAFGTRQGREFIWNDLLSLETGLIKLANGRVIEKTIYNKKIGRDEPALFVALTFERREVVDPSNIKPVNLIGVARGENIPAVIALTDPEGCPLPEFKDSSGGPTDILRIGEGYKEKQRAIQAAKEVEQRRAGGYSRKFASKSRNLADDMVRNSARDLFYHAVTHDAVLVFANLSRGFGRQGKRTFMTERQYTKMEDWLTAKLAYEGLTSKTYLSKTLAQYTSKTCSNCGFTITYADMDVMLVRLKKTSDGWATTLNNKELKAEYQITYYNRYKRQTVEKELSAELDRLSEESGNNDISKWTKGRRDEALFLLKKRFSHRPVQEQFVCLDCGHEVHAAEQAALNIARSWLFLNSNSTEFKSYKSGKQPFVGAWQAFYKRRLKEVWKPNA

SEQ ID NO: 93 - protein, 1210 aa, Unknown
  Description of Unknown: uncultured Parcubacteria group bacterium sequence
MSKRHPRISGVKGYRLHAQRLEYTGKSGAMRTIKYPLYSSPSGGRTVPREIVSAINDDYVGLYGLSNFDDLYNAEKRNEEKVYSVLDFWYDCVQYGAVFSYTAPGLLKNVAEVRGGSYELTKTLKGSHLYDELQIDKVIKFLNKKEISRANGSLDKLKKDIIDCFKAEYRERHKDQCNKLADDIKNAKKDAGASLGERQKKLFRDFFGISEQSENDKPSFTNPLNLTCCLLPFDTVNNNRNRGEVLFNKLKEYAQKLDKNEGSLEMWEYIGIGNSGTAFSNFLGEGFLGRLRENKITELKKAMMDITDAWRGQEQEEELEKRLRILAALTIKLREPKFDNHWGGYRSDINGKLSSWLQNYINQTVKIKEDLKGHKKDLKKAKEMINRFGESDTKEEAVVSSLLESIEKIVPDDSADDEKPDIPAIAIYRRFLSDGRLTLNRFVQREDVQEALIKERLEAEKKKKPKKRKKKSDAEDEKETIDFKELFPHLAKPLKLVPNFYGDSKRELYKKYKNAAIYTDALWKAVEKIYKSAFSSSLKNSFFDTDFDKDFFIKRLQKIFSVYRRFNTDKWKPIVKNSFAPYCDIVSLAENEVLYKPKQSRSRKSAAIDKNRVRLPSTENIAKAGIALARELSVAGFDWKDLLKKEEHEEYIDLIELHKTALALLLAVTETQLDISALDFVENGTVKDFMKTRDGNLVLEGRFLEMFSQSIVFSELRGLAGLMSRKEFITRSAIQTMNGKQAELLYIPHEFQSAKITTPKEMSRAFLDLAPAEFATSLEPESLSEKSLLKLKQMRYYPHYFGYELTRTGQGIDGGVAENALRLEKSPVKKREIKCKQYKTLGRGQNKIVLYVRSSYYQTQFLEWFLHRPKNVQTDVAVSGSFLIDEKKVKTRWNYDALTVALEPVSGSERVFVSQPFTIFPEKSAEEEGQRYLGIDIGEYGIAYTALEITGDSAKILDQNFISDPQLKTLREEVKGLKLDQRRGTFAMPSTKIARIRESLVHSLRNRIHHLALKHKAKIVYELEVSRFEEGKQKIKKVYATLKKADVYSEIDADKNLQTTVWGKLAVASEISASYTSQFCGACKKLWRAEMQVDETITTQELIGTVRVIKGGTLIDAIKDFMRPPIFDENDTPFPKYRDFCDKHHISKKMRGNSCLFICPFCRANADADIQASQTIALLRYVKEEKKVEDYFERFRKLKNIKVLGQMKKI

SEQ ID NO: 94 - protein, 1129 aa, Alicyclobacillus acidoterrestris
MAVKSIKVKLRLDDMPEIRAGLWKLHKEVNAGVRYYTEWLSLLRQENLYRRSPNGDGEQECDKTAEECKAELLERLRARQVENGHRGPAGSDDELLQLARQLYELLVPQAIGAKGDAQQIARKFLSPLADKDAVGGLGIAKAGNKPRWVRMREAGEPGWEEEKEKAETRKSADRTADVLRALADFGLKPLMRVYTDSEMSSVEWKPLRKGQAVRTWDRDMFQQAIERMMSWESWNQRVGQEYAKLVEQKNRFEQKNFVGQEHLVHLVNQLQQDMKEASPGLESKEQTAHYVTGRALRGSDKVFEKWGKLAPDAPFDLYDAEIKNVQRRNTRRFGSHDLFAKLAEPEYQALWREDASFLTRYAVYNSILRKLNHAKMFATFTLPDATAHPIWTRFDKLGGNLHQYTFLFNEFGERRHAIRFHKLLKVENGVAREVDDVTVPISMSEQLDNLLPRDPNEPIALYFRDYGAEQHFTGEFGGAKIQCRRDQLAHMHRRRGARDVYLNVSVRVQSQSEARGERRPPYAAVFRLVGDNHRAFVHFDKLSDYLAEHPDDGKLGSEGLLSGLRVMSVDLGLRTSASISVFRVARKDELKPNSKGRVPFFFPIKGNDNLVAVHERSQLLKLPGETESKDLRAIREERQRTLRQLRTQLAYLRLLVRCGSEDVGRRERSWAKLIEQPVDAANHMTPDWREAFENELQKLKSLHGICSDKEWMDAVYESVRRVWRHMGKQVRDWRKDVRSGERPKIRGYAKDVVGGNSIEQIEYLERQYKFLKSWSFFGKVSGQVIRAEKGSRFAITLREHIDHAKEDRLKKLADRIIMEALGYVYALDERGKGKWVAKYPPCQLILLEELSEYQFNNDRPPSENNQLMQWSHRGVFQELINQAQVHDLLVGTMYAAFSSRFDARTGAPGIRCRRVPARCTQEHNPEPFPWWLNKFVVEHTLDACPLRADDLIPTGEGEIFVSPFSAEEGDFHQIHADLNAAQNLQQRLWSDFDISQIRLRCDWGEVDGELVLIPRLTGKRTADSYSNKVFYTNTGVTYYERERGKKRRKVFAQEKLSEEEAELLVEADEAREKSVVLMRDPSGIINRGNWTRQKEFWSMVNQRIEGYLVKQIRSRVPLQDSACENTGDI

SEQ ID NO: 95 - protein, 1140 aa, Bacillus hisashii
MAPKKKRKVGIHGVPAAATRSFILKIEPNEEVKKGLWKTHEVLNHGIAYYMNILKLIRQEAIYEHHEQDPKNPKKVSKAEIQAELWDFVLKMQKCNSFTHEVDKDEVFNILRELYEELVPSSVEKKGEANQLSNKFLYPLVDPNSQSGKGTASSGRKPRWYNLKIAGDPSWEEEKKKWEEDKKKDPLAKILGKLAEYGLIPLFIPYTDSNEPIVKEIKWMEKSRNQSVRRLDKDMFIQALERFLSWESWNLKVKEEYEKVEKEYKTLEERIKEDIQALKALEQYEKERQEQLLRDTLNTNEYRLSKRGLRGWREIIQKWLKMDENEPSEKYLEVFKDYQRKHPREAGDYSVYEFLSKKENHFIWRNHPEYPYLYATFCEIDKKKKDAKQQATFTLADPINHPLWVRFEERSGSNLNKYRILTEQLHTEKLKKKLTVQLDRLIYPTESGGWEEKGKVDIVLLPSRQFYNQIFLDIEEKGKHAFTYKDESIKFPLKGTLGGARVQFDRDHLRRYPHKVESGNVGRIYFNMTVNIEPTESPVSKSLKIHRDDFPKVVNFKPKELTEWIKDSKGKKLKSGIESLEIGLRVMSIDLGQRQAAAASIFEVVDQKPDIEGKLFFPIKGTELYAVHRASFNIKLPGETLVKSREVLRKAREDNLKLMNQKLNFLRNVLHFQQFEDITEREKRVTKWISRQENSDVPLVYQDELIQIRELMYKPYKDWVAFLKQLHKRLEVEIGKEVKHWRKSLSDGRKGLYGISLKNIDEIDRTRKFLLRWSLRPTEPGEVRRLEPGQRFAIDQLNHLNALKEDRLKKMANTIIMHALGYCYDVRKKKWQAKNPACQIILFEDLSNYNPYEERSRFENSKLMKWSRREIPRQVALQGEIYGLQVGEVGAQFSSRFHAKTGSPGIRCSVVTKEKLQDNRFFKNLQREGRLTLDKIAVLKEGDLYPDKGGEKFISLSKDRKCVTTHADINAAQNLQKRFWTRTHGFYKVYCKAYQVDGQTVYIPESKDQKQKIIEEFGEGYFILKDGVYEWVNAGKLKIKKGSSKQSSSELVDSDILKDSFDLASELKGEKLMLYRDPSGNVFPSDKWMAAGVFFGKLERILISKLTNQYSISTIEDDSSKQSMKRPAATKKAGQAKKKK

SEQ ID NO: 96 - protein, 1112 aa, Bacillus sp.
MAIRSIKLKMKTNSGTDSIYLRKALWRTHQLINEGIAYYMNLLTLYRQEAIGDKTKEAYQAELINIIRNQQRNNGSSEEHGSDQEILALLRQLYELIIPSSIGESGDANQLGNKFLYPLVDPNSQSGKGTSNAGRKPRWKRLKEEGNPDWELEKKKDEERKAKDPTVKIFDNLNKYGLLPLFPLFTNIQKDIEWLPLGKRQSVRKWDKDMFIQAIERLLSWESWNRRVADEYKQLKEKTESYYKEHLTGGEEWIEKIRKFEKERNMELEKNAFAPNDGYFITSRQIRGWDRVYEKWSKLPESASPEELWKVVAEQQNKMSEGFGDPKVFSFLANRENRDIWRGHSERIYHIAAYNGLQKKLSRTKEQATFTLPDAIEHPLWIRYESPGGTNLNLFKLEEKQKKNYYVTLSKIIWPSEEKWIEKENIEIPLAPSIQFNRQIKLKQHVKGKQEISFSDYSSRISLDGVLGGSRIQFNRKYIKNHKELLGEGDIGPVFFNLVVDVAPLQETRNGRLQSPIGKALKVISSDFSKVIDYKPKELMDWMNTGSASNSFGVASLLEGMRVMSIDMGQRTSASVSIFEVVKELPKDQEQKLFYSINDTELFAIHKRSFLLNLPGEVVTKNNKQQRQERRKKRQFVRSQIRMLANVLRLETKKTPDERKKAIHKLMEIVQSYDSWTASQKEVWEKELNLLTNMAAFNDEIWKESLVELHHRIEPYVGQIVSKWRKGLSEGRKNLAGISMWNIDELEDTRRLLISWSKRSRTPGEANRIETDEPFGSSLLQHIQNVKDDRLKQMANLIIMTALGFKYDKEEKDRYKRWKETYPACQIILFENLNRYLFNLDRSRRENSRLMKWAHRSIPRTVSMQGEMFGLQVGDVRSEYSSRFHAKTGAPGIRCHALTEEDLKAGSNTLKRLIEDGFINESELAYLKKGDIIPSQGGELFVTLSKRYKKDSDNNELTVIHADINAAQNLQKRFWQQNSEVYRVPCQLARMGEDKLYIPKSQTETIKKYFGKGSFVKNNTEQEVYKWEKSEKMKIKTDTTFDLQDLDGFEDISKTIELAQEQQKKYLTMFRDPSGYFFNNETWRPQKEYWSIVNNIIKSCLKKKILSNKVEL

SEQ ID NO: 97 - protein, 1300 aa, Francisella novicida
MSIYQEFVNKYSLSKTLRFELIPQGKTLENIKARGLILDDEKRAKDYKKAKQIIDKYHQFFIEEILSSVCISEDLLQNYSDVYFKLKKSDDDNLQKDFKSAKDTIKKQISEYIKDSEKFKNLFNQNLIDAKKGQESDLILWLKQSKDNGIELFKANSDITDIDEALEIIKSFKGWTTYFKGFHENRKNVYSSNDIPTSIIYRIVDDNLPKFLENKAKYESLKDKAPEAINYEQIKKDLAEELTFDIDYKTSEVNQRVFSLDEVFEIANFNNYLNQSGITKFNTIIGGKFVNGENTKRKGINEYINLYSQQINDKTLKKYKMSVLFKQILSDTESKSFVIDKLEDDSDVVTTMQSFYEQIAAFKTVEEKSIKETLSLLFDDLKAQKLDLSKIYFKNDKSLTDLSQQVFDDYSVIGTAVLEYITQQIAPKNLDNPSKKEQELIAKKTEKAKYLSLETIKLALEEFNKHRDIDKQCRFEEILANFAAIPMIFDEIAQNKDNLAQISIKYQNQGKKDLLQASAEDDVKAIKDLLDQTNNLLHKLKIFHISQSEDKANILDKDEHFYLVFEECYFELANIVPLYNKIRNYITQKPYSDEKFKLNFENSTLANGWDKNKEPDNTAILFIKDDKYYLGVMNKKNNKIFDDKAIKENKGEGYKKIVYKLLPGANKMLPKVFFSAKSIKFYNPSEDILRIRNHSTHTKNGSPQKGYEKFEFNIEDCRKFIDFYKQSISKHPEWKDFGFRFSDTQRYNSIDEFYREVENQGYKLTFENISESYIDSVVNQGKLYLFQIYNKDFSAYSKGRPNLHTLYWKALFDERNLQDVVYKLNGEAELFYRKQSIPKKITHPAKEAIANKNKDNPKKESVFEYDLIKDKRFTEDKFFFHCPITINFKSSGANKFNDEINLLLKEKANDVHILSIDRGERHLAYYTLVDGKGNIIKQDTFNIIGNDRMKTNYHDKLAAIEKDRDSARKDWKKINNIKEMKEGYLSQVVHEIAKLVIEYNAIVVFEDLNFGFKRGRFKVEKQVYQKLEKMLIEKLNYLVFKDNEFDKTGGVLRAYQLTAPFETFKKMGKQTGIIYYVPAGFTSKICPVTGFVNQLYPKYESVSKSQEFFSKFDKICYNLDKGYFEFSFDYKNFGDKAAKGKWTIASFGSRLINFRNSDKNHNWDTREVYPTKELEKLLKDYSIEYGHGECIKAAICGESDKKFFAKLTSVLNTILQMRNSKTGTELDYLISPVADVNGNFFDSRQAPKNMPQDADANGAYHIGLKGLMLLGRIKNNQEGKKLNLVIKNEEYFEFVQNRNN

SEQ ID NO: 98 - protein, 1300 aa, Francisella novicida
MSIYQEFVNKYSLSKTLRFELIPQGKTLENIKARGLILDDEKRAKDYKKAKQIIDKYHQFFIEEILSSVCISEDLLQNYSDVYFKLKKSDDDNLQKDFKSAKDTIKKQISEYIKDSEKFKNLFNQNLIDAKKGQESDLILWLKQSKDNGIELFKANSDITDIDEALEIIKSFKGWTTYFKGFHENRKNVYSSNDIPTSIIYRIVDDNLPKFLENKAKYESLKDKAPEAINYEQIKKDLAEELTFDIDYKTSEVNQRVFSLDEVFEIANFNNYLNQSGITKFNTIIGGKFVNGENTKRKGINEYINLYSQQINDKTLKKYKMSVLFKQILSDTESKSFVIDKLEDDSDVVTTMQSFYEQIAAFKTVEEKSIKETLSLLFDDLKAQKLDLSKIYFKNDKSLTDLSQQVFDDYSVIGTAVLEYITQQIAPKNLDNPSKKEQELIAKKTEKAKYLSLETIKLALEEFNKHRDIDKQCRFEEILANFAAIPMIFDEIAQNKDNLAQISIKYQNQGKKDLLQASAEDDVKAIKDLLDQTNNLLHKLKIFHISQSEDKANILDKDEHFYLVFEECYFELANIVPLYNKIRNYITQKPYSDEKFKLNFENSTLANGWDKNKEPDNTAILFIKDDKYYLGVMNKKNNKIFDDKAIKENKGEGYKKIVYKLLPGANKMLPKVFFSAKSIKFYNPSEDILRIRNHSTHTKNGSPQKGYEKFEFNIEDCRKFIDFYKQSISKHPEWKDFGFRFSDTQRYNSIDEFYREVENQGYKLTFENISESYIDSVVNQGKLYLFQIYNKDFSAYSKGRPNLHTLYWKALFDERNLQDVVYKLNGEAELFYRKQSIPKKITHPAKEAIANKNKDNPKKESVFEYDLIKDKRFTEDKFFFHCPITINFKSSGANKFNDEINLLLKEKANDVHILSIARGERHLAYYTLVDGKGNIIKQDTFNIIGNDRMKTNYHDKLAAIEKDRDSARKDWKKINNIKEMKEGYLSQVVHEIAKLVIEYNAIVVFEDLNFGFKRGRFKVEKQVYQKLEKMLIEKLNYLVFKDNEFDKTGGVLRAYQLTAPFETFKKMGKQTGIIYYVPAGFTSKICPVTGFVNQLYPKYESVSKSQEFFSKFDKICYNLDKGYFEFSFDYKNFGDKAAKGKWTIASFGSRLINFRNSDKNHNWDTREVYPTKELEKLLKDYSIEYGHGECIKAAICGESDKKFFAKLTSVLNTILQMRNSKTGTELDYLISPVADVNGNFFDSRQAPKNMPQDADANGAYHIGLKGLMLLGRIKNNQEGKKLNLVIKNEEYFEFVQNRNN

SEQ ID NO: 99 - protein, 1300 aa, Francisella novicida
MSIYQEFVNKYSLSKTLRFELIPQGKTLENIKARGLILDDEKRAKDYKKAKQIIDKYHQFFIEEILSSVCISEDLLQNYSDVYFKLKKSDDDNLQKDFKSAKDTIKKQISEYIKDSEKFKNLFNQNLIDAKKGQESDLILWLKQSKDNGIELFKANSDITDIDEALEIIKSFKGWTTYFKGFHENRKNVYSSNDIPTSIIYRIVDDNLPKFLENKAKYESLKDKAPEAINYEQIKKDLAEELTFDIDYKTSEVNQRVFSLDEVFEIANFNNYLNQSGITKFNTIIGGKFVNGENTKRKGINEYINLYSQQINDKTLKKYKMSVLFKQILSDTESKSFVIDKLEDDSDVVTTMQSFYEQIAAFKTVEEKSIKETLSLLFDDLKAQKLDLSKIYFKNDKSLTDLSQQVFDDYSVIGTAVLEYITQQIAPKNLDNPSKKEQELIAKKTEKAKYLSLETIKLALEEFNKHRDIDKQCRFEEILANFAAIPMIFDEIAQNKDNLAQISIKYQNQGKKDLLQASAEDDVKAIKDLLDQTNNLLHKLKIFHISQSEDKANILDKDEHFYLVFEECYFELANIVPLYNKIRNYITQKPYSDEKFKLNFENSTLANGWDKNKEPDNTAILFIKDDKYYLGVMNKKNNKIFDDKAIKENKGEGYKKIVYKLLPGANKMLPKVFFSAKSIKFYNPSEDILRIRNHSTHTKNGSPQKGYEKFEFNIEDCRKFIDFYKQSISKHPEWKDFGFRFSDTQRYNSIDEFYREVENQGYKLTFENISESYIDSVVNQGKLYLFQIYNKDFSAYSKGRPNLHTLYWKALFDERNLQDVVYKLNGEAELFYRKQSIPKKITHPAKEAIANKNKDNPKKESVFEYDLIKDKRFTEDKFFFHCPITINFKSSGANKFNDEINLLLKEKANDVHILSIDRGERHLAYYTLVDGKGNIIKQDTFNIIGNDRMKTNYHDKLAAIEKDRDSARKDWKKINNIKEMKEGYLSQVVHEIAKLVIEYNAIVVFADLNFGFKRGRFKVEKQVYQKLEKMLIEKLNYLVFKDNEFDKTGGVLRAYQLTAPFETFKKMGKQTGIIYYVPAGFTSKICPVTGFVNQLYPKYESVSKSQEFFSKFDKICYNLDKGYFEFSFDYKNFGDKAAKGKWTIASFGSRLINFRNSDKNHNWDTREVYPTKELEKLLKDYSIEYGHGECIKAAICGESDKKFFAKLTSVLNTILQMRNSKTGTELDYLISPVADVNGNFFDSRQAPKNMPQDADANGAYHIGLKGLMLLGRIKNNQEGKKLNLVIKNEEYFEFVQNRNN

SEQ ID NO: 100 - protein, 1300 aa, Francisella novicida
MSIYQEFVNKYSLSKTLRFELIPQGKTLENIKARGLILDDEKRAKDYKKAKQIIDKYHQFFIEEILSSVCISEDLLQNYSDVYFKLKKSDDDNLQKDFKSAKDTIKKQISEYIKDSEKFKNLFNQNLIDAKKGQESDLILWLKQSKDNGIELFKANSDITDIDEALEIIKSFKGWTTYFKGFHENRKNVYSSNDIPTSIIYRIVDDNLPKFLENKAKYESLKDKAPEAINYEQIKKDLAEELTFDIDYKTSEVNQRVFSLDEVFEIANFNNYLNQSGITKFNTIIGGKFVNGENTKRKGINEYINLYSQQINDKTLKKYKMSVLFKQILSDTESKSFVIDKLEDDSDVVTTMQSFYEQIAAFKTVEEKSIKETLSLLFDDLKAQKLDLSKIYFKNDKSLTDLSQQVFDDYSVIGTAVLEYITQQIAPKNLDNPSKKEQELIAKKTEKAKYLSLETIKLALEEFNKHRDIDKQCRFEEILANFAAIPMIFDEIAQNKDNLAQISIKYQNQGKKDLLQASAEDDVKAIKDLLDQTNNLLHKLKIFHISQSEDKANILDKDEHFYLVFEECYFELANIVPLYNKIRNYITQKPYSDEKFKLNFENSTLANGWDKNKEPDNTAILFIKDDKYYLGVMNKKNNKIFDDKAIKENKGEGYKKIVYKLLPGANKMLPKVFFSAKSIKFYNPSEDILRIRNHSTHTKNGSPQKGYEKFEFNIEDCRKFIDFYKQSISKHPEWKDFGFRFSDTQRYNSIDEFYREVENQGYKLTFENISESYIDSVVNQGKLYLFQIYNKDFSAYSKGRPNLHTLYWKALFDERNLQDVVYKLNGEAELFYRKQSIPKKITHPAKEAIANKNKDNPKKESVFEYDLIKDKRFTEDKFFFHCPITINFKSSGANKFNDEINLLLKEKANDVHILSIDRGERHLAYYTLVDGKGNIIKQDTFNIIGNDRMKTNYHDKLAAIEKDRDSARKDWKKINNIKEMKEGYLSQVVHEIAKLVIEYNAIVVFEDLNFGFKRGRFKVEKQVYQKLEKMLIEKLNYLVFKDNEFDKTGGVLRAYQLTAPFETFKKMGKQTGIIYYVPAGFTSKICPVTGFVNQLYPKYESVSKSQEFFSKFDKICYNLDKGYFEFSFDYKNFGDKAAKGKWTIASFGSRLINFRNSDKNHNWDTREVYPTKELEKLLKDYSIEYGHGECIKAAICGESDKKFFAKLTSVLNTILQMRNSKTGTELDYLISPVADVNGNFFDSRQAPKNMPQDAAANGAYHIGLKGLMLLGRIKNNQEGKKLNLVIKNEEYFEFVQNRNN

SEQ ID NO: 101 - protein, 1300 aa, Francisella novicida
MSIYQEFVNKYSLSKTLRFELIPQGKTLENIKARGLILDDEKRAKDYKKAKQIIDKYHQFFIEEILSSVCISEDLLQNYSDVYFKLKKSDDDNLQKDFKSAKDTIKKQISEYIKDSEKFKNLFNQNLIDAKKGQESDLILWLKQSKDNGIELFKANSDITDIDEALEIIKSFKGWTTYFKGFHENRKNVYSSNDIPTSIIYRIVDDNLPKFLENKAKYESLKDKAPEAINYEQIKKDLAEELTFDIDYKTSEVNQRVFSLDEVFEIANFNNYLNQSGITKFNTIIGGKFVNGENTKRKGINEYINLYSQQINDKTLKKYKMSVLFKQILSDTESKSFVIDKLEDDSDVVTTMQSFYEQIAAFKTVEEKSIKETLSLLFDDLKAQKLDLSKIYFKNDKSLTDLSQQVFDDYSVIGTAVLEYITQQIAPKNLDNPSKKEQELIAKKTEKAKYLSLETIKLALEEFNKHRDIDKQCRFEEILANFAAIPMIFDEIAQNKDNLAQISIKYQNQGKKDLLQASAEDDVKAIKDLLDQTNNLLHKLKIFHISQSEDKANILDKDEHFYLVFEECYFELANIVPLYNKIRNYITQKPYSDEKFKLNFENSTLANGWDKNKEPDNTAILFIKDDKYYLGVMNKKNNKIFDDKAIKENKGEGYKKIVYKLLPGANKMLPKVFFSAKSIKFYNPSEDILRIRNHSTHTKNGSPQKGYEKFEFNIEDCRKFIDFYKQSISKHPEWKDFGFRFSDTQRYNSIDEFYREVENQGYKLTFENISESYIDSVVNQGKLYLFQIYNKDFSAYSKGRPNLHTLYWKALFDERNLQDVVYKLNGEAELFYRKQSIPKKITHPAKEAIANKNKDNPKKESVFEYDLIKDKRFTEDKFFFHCPITINFKSSGANKFNDEINLLLKEKANDVHILSIARGERHLAYYTLVDGKGNIIKQDTFNIIGNDRMKTNYHDKLAAIEKDRDSARKDWKKINNIKEMKEGYLSQVVHEIAKLVIEYNAIVVFADLNFGFKRGRFKVEKQVYQKLEKMLIEKLNYLVFKDNEFDKTGGVLRAYQLTAPFETFKKMGKQTGIIYYVPAGFTSKICPVTGFVNQLYPKYESVSKSQEFFSKFDKICYNLDKGYFEFSFDYKNFGDKAAKGKWTIASFGSRLINFRNSDKNHNWDTREVYPTKELEKLLKDYSIEYGHGECIKAAICGESDKKFFAKLTSVLNTILQMRNSKTGTELDYLISPVADVNGNFFDSRQAPKNMPQDADANGAYHIGLKGLMLLGRIKNNQEGKKLNLVIKNEEYFEFVQNRNN

SEQ ID NO: 102 - protein, 1300 aa, Francisella novicida
MSIYQEFVNKYSLSKTLRFELIPQGKTLENIKARGLILDDEKRAKDYKKAKQIIDKYHQFFIEEILSSVCISEDLLQNYSDVYFKLKKSDDDNLQKDFKSAKDTIKKQISEYIKDSEKFKNLFNQNLIDAKKGQESDLILWLKQSKDNGIELFKANSDITDIDEALEIIKSFKGWTTYFKGFHENRKNVYSSNDIPTSIIYRIVDDNLPKFLENKAKYESLKDKAPEAINYEQIKKDLAEELTFDIDYKTSEVNQRVFSLDEVFEIANFNNYLNQSGITKFNTIIGGKFVNGENTKRKGINEYINLYSQQINDKTLKKYKMSVLFKQILSDTESKSFVIDKLEDDSDVVTTMQSFYEQIAAFKTVEEKSIKETLSLLFDDLKAQKLDLSKIYFKNDKSLTDLSQQVFDDYSVIGTAVLEYITQQIAPKNLDNPSKKEQELIAKKTEKAKYLSLETIKLALEEFNKHRDIDKQCRFEEILANFAAIPMIFDEIAQNKDNLAQISIKYQNQGKKDLLQASAEDDVKAIKDLLDQTNNLLHKLKIFHISQSEDKANILDKDEHFYLVFEECYFELANIVPLYNKIRNYITQKPYSDEKFKLNFENSTLANGWDKNKEPDNTAILFIKDDKYYLGVMNKKNNKIFDDKAIKENKGEGYKKIVYKLLPGANKMLPKVFFSAKSIKFYNPSEDILRIRNHSTHTKNGSPQKGYEKFEFNIEDCRKFIDFYKQSISKHPEWKDFGFRFSDTQRYNSIDEFYREVENQGYKLTFENISESYIDSVVNQGKLYLFQIYNKDFSAYSKGRPNLHTLYWKALFDERNLQDVVYKLNGEAELFYRKQSIPKKITHPAKEAIANKNKDNPKKESVFEYDLIKDKRFTEDKFFFHCPITINFKSSGANKFNDEINLLLKEKANDVHILSIARGERHLAYYTLVDGKGNIIKQDTFNIIGNDRMKTNYHDKLAAIEKDRDSARKDWKKINNIKEMKEGYLSQVVHEIAKLVIEYNAIVVFEDLNFGFKRGRFKVEKQVYQKLEKMLIEKLNYLVFKDNEFDKTGGVLRAYQLTAPFETFKKMGKQTGIIYYVPAGFTSKICPVTGFVNQLYPKYESVSKSQEFFSKFDKICYNLDKGYFEFSFDYKNFGDKAAKGKWTIASFGSRLINFRNSDKNHNWDTREVYPTKELEKLLKDYSIEYGHGECIKAAICGESDKKFFAKLTSVLNTILQMRNSKTGTELDYLISPVADVNGNFFDSRQAPKNMPQDAAANGAYHIGLKGLMLLGRIKNNQEGKKLNLVIKNEEYFEFVQNRNN

SEQ ID NO: 103 - protein, 1300 aa, Francisella novicida
MSIYQEFVNKYSLSKTLRFELIPQGKTLENIKARGLILDDEKRAKDYKKAKQIIDKYHQFFIEEILSSVCISEDLLQNYSDVYFKLKKSDDDNLQKDFKSAKDTIKKQISEYIKDSEKFKNLFNQNLIDAKKGQESDLILWLKQSKDNGIELFKANSDITDIDEALEIIKSFKGWTTYFKGFHENRKNVYSSNDIPTSIIYRIVDDNLPKFLENKAKYESLKDKAPEAINYEQIKKDLAEELTFDIDYKTSEVNQRVFSLDEVFEIANFNNYLNQSGITKFNTIIGGKFVNGENTKRKGINEYINLYSQQINDKTLKKYKMSVLFKQILSDTESKSFVIDKLEDDSDVVTTMQSFYEQIAAFKTVEEKSIKETLSLLFDDLKAQKLDLSKIYFKNDKSLTDLSQQVFDDYSVIGTAVLEYITQQIAPKNLDNPSKKEQELIAKKTEKAKYLSLETIKLALEEFNKHRDIDKQCRFEEILANFAAIPMIFDEIAQNKDNLAQISIKYQNQGKKDLLQASAEDDVKAIKDLLDQTNNLLHKLKIFHISQSEDKANILDKDEHFYLVFEECYFELANIVPLYNKIRNYITQKPYSDEKFKLNFENSTLANGWDKNKEPDNTAILFIKDDKYYLGVMNKKNNKIFDDKAIKENKGEGYKKIVYKLLPGANKMLPKVFFSAKSIKFYNPSEDILRIRNHSTHTKNGSPQKGYEKFEFNIEDCRKFIDFYKQSISKHPEWKDFGFRFSDTQRYNSIDEFYREVENQGYKLTFENISESYIDSVVNQGKLYLFQIYNKDFSAYSKGRPNLHTLYWKALFDERNLQDVVYKLNGEAELFYRKQSIPKKITHPAKEAIANKNKDNPKKESVFEYDLIKDKRFTEDKFFFHCPITINFKSSGANKFNDEINLLLKEKANDVHILSIDRGERHLAYYTLVDGKGNIIKQDTFNIIGNDRMKTNYHDKLAAIEKDRDSARKDWKKINNIKEMKEGYLSQVVHEIAKLVIEYNAIVVFADLNFGFKRGRFKVEKQVYQKLEKMLIEKLNYLVFKDNEFDKTGGVLRAYQLTAPFETFKKMGKQTGIIYYVPAGFTSKICPVTGFVNQLYPKYESVSKSQEFFSKFDKICYNLDKGYFEFSFDYKNFGDKAAKGKWTIASFGSRLINFRNSDKNHNWDTREVYPTKELEKLLKDYSIEYGHGECIKAAICGESDKKFFAKLTSVLNTILQMRNSKTGTELDYLISPVADVNGNFFDSRQAPKNMPQDAAANGAYHIGLKGLMLLGRIKNNQEGKKLNLVIKNEEYFEFVQNRNN

SEQ ID NO: 104 - protein, 1300 aa, Francisella novicida
MSIYQEFVNKYSLSKTLRFELIPQGKTLENIKARGLILDDEKRAKDYKKAKQIIDKYHQFFIEEILSSVCISEDLLQNYSDVYFKLKKSDDDNLQKDFKSAKDTIKKQISEYIKDSEKFKNLFNQNLIDAKKGQESDLILWLKQSKDNGIELFKANSDITDIDEALEIIKSFKGWTTYFKGFHENRKNVYSSNDIPTSIIYRIVDDNLPKFLENKAKYESLKDKAPEAINYEQIKKDLAEELTFDIDYKTSEVNQRVFSLDEVFEIANFNNYLNQSGITKFNTIIGGKFVNGENTKRKGINEYINLYSQQINDKTLKKYKMSVLFKQILSDTESKSFVIDKLEDDSDVVTTMQSFYEQIAAFKTVEEKSIKETLSLLFDDLKAQKLDLSKIYFKNDKSLTDLSQQVFDDYSVIGTAVLEYITQQIAPKNLDNPSKKEQELIAKKTEKAKYLSLETIKLALEEFNKHRDIDKQCRFEEILANFAAIPMIFDEIAQNKDNLAQISIKYQNQGKKDLLQASAEDDVKAIKDLLDQTNNLLHKLKIFHISQSEDKANILDKDEHFYLVFEECYFELANIVPLYNKIRNYITQKPYSDEKFKLNFENSTLANGWDKNKEPDNTAILFIKDDKYYLGVMNKKNNKIFDDKAIKENKGEGYKKIVYKLLPGANKMLPKVFFSAKSIKFYNPSEDILRIRNHSTHTKNGSPQKGYEKFEFNIEDCRKFIDFYKQSISKHPEWKDFGFRFSDTQRYNSIDEFYREVENQGYKLTFENISESYIDSVVNQGKLYLFQIYNKDFSAYSKGRPNLHTLYWKALFDERNLQDVVYKLNGEAELFYRKQSIPKKITHPAKEAIANKNKDNPKKESVFEYDLIKDKRFTEDKFFFHCPITINFKSSGANKFNDEINLLLKEKANDVHILSIARGERHLAYYTLVDGKGNIIKQDTFNIIGNDRMKTNYHDKLAAIEKDRDSARKDWKKINNIKEMKEGYLSQVVHEIAKLVIEYNAIVVFADLNFGFKRGRFKVEKQVYQKLEKMLIEKLNYLVFKDNEFDKTGGVLRAYQLTAPFETFKKMGKQTGIIYYVPAGFTSKICPVTGFVNQLYPKYESVSKSQEFFSKFDKICYNLDKGYFEFSFDYKNFGDKAAKGKWTIASFGSRLINFRNSDKNHNWDTREVYPTKELEKLLKDYSIEYGHGECIKAAICGESDKKFFAKLTSVLNTILQMRNSKTGTELDYLISPVADVNGNFFDSRQAPKNMPQDAAANGAYHIGLKGLMLLGRIKNNQEGKKLNLVIKNEEYFEFVQNRNN

SEQ ID NO: 105 - protein, 1053 aa, Staphylococcus aureus
MKRNYILGLDIGITSVGYGIIDYETRDVIDAGVRLFKEANVENNEGRRSKRGARRLKRRRRHRIQRVKKLLFDYNLLTDHSELSGINPYEARVKGLSQKLSEEEFSAALLHLAKRRGVHNVNEVEEDTGNELSTKEQISRNSKALEEKYVAELQLERLKKDGEVRGSINRFKTSDYVKEAKQLLKVQKAYHQLDQSFIDTYIDLLETRRTYYEGPGEGSPFGWKDIKEWYEMLMGHCTYFPEELRSVKYAYNADLYNALNDLNNLVITRDENEKLEYYEKFQIIENVFKQKKKPTLKQIAKEILVNEEDIKGYRVTSTGKPEFTNLKVYHDIKDITARKEIIENAELLDQIAKILTIYQSSEDIQEELTNLNSELTQEEIEQISNLKGYTGTHNLSLKAINLILDELWHTNDNQIAIFNRLKLVPKKVDLSQQKEIPTTLVDDFILSPVVKRSFIQSIKVINAIIKKYGLPNDIIIELAREKNSKDAQKMINEMQKRNRQTNERIEEIIRTTGKENAKYLIEKIKLHDMQEGKCLYSLEAIPLEDLLNNPFNYEVDHIIPRSVSFDNSFNNKVLVKQEENSKKGNRTPFQYLSSSDSKISYETFKKHILNLAKGKGRISKTKKEYLLEERDINRFSVQKDFINRNLVDTRYATRGLMNLLRSYFRVNNLDVKVKSINGGFTSFLRRKWKFKKERNKGYKHHAEDALIIANADFIFKEWKKLDKAKKVMENQMFEEKQAESMPEIETEQEYKEIFITPHQIKHIKDFKDYKYSHRVDKKPNRELINDTLYSTRKDDKGNTLIVNNLNGLYDKDNDKLKKLINKSPEKLLMYHHDPQTYQKLKLIMEQYGDEKNPLYKYYEETGNYLTKYSKKDNGPVIKKIKYYGNKLNAHLDITDDYPNSRNKVVKLSLKPYRFDVYLDNGVYKFVTVKNLDVIKKENYYEVNSKCYEEAKKLKKISNQAEFIASFYNNDLIKINGELYRVIGVNNDLLNRIEVNMIDITYREYLENMNDKRPPRIIKTIASKTQSIKKYSTDILGNLYEVKSKKHPQIIKKG

SEQ ID NO: 106 - protein, 1052 aa, Staphylococcus aureus
KRNYILGLDIGITSVGYGIIDYETRDVIDAGVRLFKEANVENNEGRRSKRGARRLKRRRRHRIQRVKKLLFDYNLLTDHSELSGINPYEARVKGLSQKLSEEEFSAALLHLAKRRGVHNVNEVEEDTGNELSTKEQISRNSKALEEKYVAELQLERLKKDGEVRGSINRFKTSDYVKEAKQLLKVQKAYHQLDQSFIDTYIDLLETRRTYYEGPGEGSPFGWKDIKEWYEMLMGHCTYFPEELRSVKYAYNADLYNALNDLNNLVITRDENEKLEYYEKFQIIENVFKQKKKPTLKQIAKEILVNEEDIKGYRVTSTGKPEFTNLKVYHDIKDITARKEIIENAELLDQIAKILTIYQSSEDIQEELTNLNSELTQEEIEQISNLKGYTGTHNLSLKAINLILDELWHTNDNQIAIFNRLKLVPKKVDLSQQKEIPTTLVDDFILSPVVKRSFIQSIKVINAIIKKYGLPNDIIIELAREKNSKDAQKMINEMQKRNRQTNERIEEIIRTTGKENAKYLIEKIKLHDMQEGKCLYSLEAIPLEDLLNNPFNYEVDHIIPRSVSFDNSFNNKVLVKQEEASKKGNRTPFQYLSSSDSKISYETFKKHILNLAKGKGRISKTKKEYLLEERDINRFSVQKDFINRNLVDTRYATRGLMNLLRSYFRVNNLDVKVKSINGGFTSFLRRKWKFKKERNKGYKHHAEDALIIANADFIFKEWKKLDKAKKVMENQMFEEKQAESMPEIETEQEYKEIFITPHQIKHIKDFKDYKYSHRVDKKPNRELINDTLYSTRKDDKGNTLIVNNLNGLYDKDNDKLKKLINKSPEKLLMYHHDPQTYQKLKLIMEQYGDEKNPLYKYYEETGNYLTKYSKKDNGPVIKKIKYYGNKLNAHLDITDDYPNSRNKVVKLSLKPYRFDVYLDNGVYKFVTVKNLDVIKKENYYEVNSKCYEEAKKLKKISNQAEFIASFYNNDLIKINGELYRVIGVNNDLLNRIEVNMIDITYREYLENMNDKRPPRIIKTIASKTQSIKKYSTDILGNLYEVKSKKHPQIIKKG

SEQ ID NO: 107 - protein, 1052 aa, Staphylococcus aureus
KRNYILGLDIGITSVGYGIIDYETRDVIDAGVRLFKEANVENNEGRRSKRGARRLKRRRRHRIQRVKKLLFDYNLLTDHSELSGINPYEARVKGLSQKLSEEEFSAALLHLAKRRGVHNVNEVEEDTGNELSTKEQISRNSKALEEKYVAELQLERLKKDGEVRGSINRFKTSDYVKEAKQLLKVQKAYHQLDQSFIDTYIDLLETRRTYYEGPGEGSPFGWKDIKEWYEMLMGHCTYFPEELRSVKYAYNADLYNALNDLNNLVITRDENEKLEYYEKFQIIENVFKQKKKPTLKQIAKEILVNEEDIKGYRVTSTGKPEFTNLKVYHDIKDITARKEIIENAELLDQIAKILTIYQSSEDIQEELTNLNSELTQEEIEQISNLKGYTGTHNLSLKAINLILDELWHTNDNQIAIFNRLKLVPKKVDLSQQKEIPTTLVDDFILSPVVKRSFIQSIKVINAIIKKYGLPNDIIIELAREKNSKDAQKMINEMQKRNRQTNERIEEIIRTTGKENAKYLIEKIKLHDMQEGKCLYSLEAIPLEDLLNNPFNYEVDHIIPRSVSFDNSFNNKVLVKQEEASKKGNRTPFQYLSSSDSKISYETFKKHILNLAKGKGRISKTKKEYLLEERDINRFSVQKDFINRNLVDTRYATRGLMNLLRSYFRVNNLDVKVKSINGGFTSFLRRKWKFKKERNKGYKHHAEDALIIANADFIFKEWKKLDKAKKVMENQMFEEKQAESMPEIETEQEYKEIFITPHQIKHIKDFKDYKYSHRVDKKPNRKLINDTLYSTRKDDKGNTLIVNNLNGLYDKDNDKLKKLINKSPEKLLMYHHDPQTYQKLKLIMEQYGDEKNPLYKYYEETGNYLTKYSKKDNGPVIKKIKYYGNKLNAHLDITDDYPNSRNKVVKLSLKPYRFDVYLDNGVYKFVTVKNLDVIKKENYYEVNSKCYEEAKKLKKISNQAEFIASFYKNDLIKINGELYRVIGVNNDLLNRIEVNMIDITYREYLENMNDKRPPHIIKTIASKTQSIKKYSTDILGNLYEVKSKKHPQIIKKG

SEQ ID NO: 108 - protein, 1368 aa, Artificial Sequence
  Description of Artificial Sequence: Synthetic polypeptide
MDKKYSIGLAIGTNSVGWAVITDEYKVPSKKFKVLGNTDRHSIKKNLIGALLFDSGETAEATRLKRTARRRYTRRKNRICYLQEIFSNEMAKVDDSFFHRLEESFLVEEDKKHERHPIFGNIVDEVAYHEKYPTIYHLRKKLVDSTDKADLRLIYLALAHMIKFRGHFLIEGDLNPDNSDVDKLFIQLVQTYNQLFEENPINASGVDAKAILSARLSKSRRLENLIAQLPGEKKNGLFGNLIALSLGLTPNFKSNFDLAEDAKLQLSKDTYDDDLDNLLAQIGDQYADLFLAAKNLSDAILLSDILRVNTEITKAPLSASMIKRYDEHHQDLTLLKALVRQQLPEKYKEIFFDQSKNGYAGYIDGGASQEEFYKFIKPILEKMDGTEELLVKLNREDLLRKQRTFDNGSIPHQIHLGELHAILRRQEDFYPFLKDNREKIEKILTFRIPYYVGPLARGNSRFAWMTRKSEETITPWNFEEVVDKGASAQSFIERMTAFDKNLPNEKVLPKHSLLYEYFTVYNELTKVKYVTEGMRKPAFLSGEQKKAIVDLLFKTNRKVTVKQLKEDYFKKIECFDSVEISGVEDRFNASLGTYHDLLKIIKDKDFLDNEENEDILEDIVLTLTLFEDREMIEERLKTYAHLFDDKVMKQLKRRRYTGWGALSRKLINGIRDKQSGKTILDFLKSDGFANRNFMALIHDDSLTFKEDIQKAQVSGQGDSLHEHIANLAGSPAIKKGILQTVKVVDELVKVMGRHKPENIVIEMARENQTTQKGQKNSRERMKRIEEGIKELGSQILKEHPVENTQLQNEKLYLYYLQNGRDMYVDQELDINRLSDYDVDHIVPQSFLKDDSIDNKVLTRSDKNRGKSDNVPSEEVVKKMKNYWRQLLNAKLITQRKFDNLTKAERGGLSELDKAGFIKRQLVETRAITKHVAQILDSRMNTKYDENDKLIREVKVITLKSKLVSDFRKDFQFYKVREINNYHHAHDAYLNAVVGTALIKKYPKLESEFVYGDYKVYDVRKMIAKSEQEIGKATAKYFFYSNIMNFFKTEITLANGEIRKRPLIETNGETGEIVWDKGRDFATVRKVLSMPQVNIVKKTEVQTGGFSKESILPKRNSDKLIARKKDWDPKKYGGFDSPTVAYSVLVVAKVEKGKSKKLKSVKELLGITIMERSSFEKNPIDFLEAKGYKEVKKDLIIKLPKYSLFELENGRKRMLASAGELQKGNELALPSKYVNFLYLASHYEKLKGSPEDNEQKQLFVEQHKHYLDEIIEQISEFSKRVILADANLDKVLSAYNKHRDKPIREQAENIIHLFTLTNLGAPAAFKYFDTTIDRKRYTSTKEVLDATLIHQSITGLYETRIDLSQLGGD

SEQ ID NO: 109 - protein, 1367 aa, Streptococcus pyogenes
MDKKYSIGLAIGTNSVGWAVITDEYKVPSKKFKVLGNTDRHSIKKNLIGALLFDSGETAEATRLKRTARRRYTRRKNRICYLQEIFSNEMAKVDDSFFHRLEESFVEEDKKHERHPIFGNIVDEVAYHEKYPTIYHLRKKLVDSTDKADLRLIYLALAHMIKFRGHFLIEGDLNPDNSDVDKLFIQLVQTYNQLFEENPINASGVDAKAILSARLSKSRRLENLIAQLPGEKKNGLFGNLIALSLGLTPNFKSNFDLAEDAKLQLSKDTYDDDLDNLLAQIGDQYADLFLAAKNLSDAILLSDILRVNTEITKAPLSASMIKRYDEHHQDLTLLKALVRQQLPEKYKEIFFDQSKNGYAGYIDGGASQEEFYKFIKPILEKMDGTEELLVKLNREDLLRKQRTFDNGSIPHQIHLGELHAILRRQEDFYPFLKDNREKIEKILTFRIPYYVGPLARGNSRFAWMTRKSEETITPWNFEEVVDKGASAQSFIERMTNFDKNLPNEKVLPKHSLLYEYFTVYNELTKVKYVTEGMRKPAFLSGEQKKAIVDLLFKTNRKVTVKQLKEDYFKKIECFDSVEISGVEDRFNASLGTYHDLLKIIKDKDFLDNEENEDILEDIVLTLTLFEDREMIEERLKTYAHLFDDKVMKQLKRRRYTGWGRLSRKLINGIRDKQSGKTILDFLKSDGFANRNFMQLIHDDSLTFKEDIQKAQVSGQGDSLHEHIANLAGSPAIKKGILQTVKVVDELVKVMGRHKPENIVIEMARENQTTQKGQKNSRERMKRIEEGIKELGSQILKEHPVENTQLQNEKLYLYYLQNGRDMYVDQELDINRLSDYDVDHIVPQSFLKDDSIDNKVLTRSDKNRGKSDNVPSEEVVKKMKNYWRQLLNAKLITQRKFDNLTKAERGGLSELDKAGFIKRQLVETRQITKHVAQILDSRMNTKYDENDKLIREVKVITLKSKLVSDFRKDFQFYKVREINNYHHAHDAYLNAVVGTALIKKYPKLESEFVYGDYKVYDVRKMIAKSEQEIGKATAKYFFYSNIMNFFKTEITLANGEIRKRPLIETNGETGEIVWDKGRDFATVRKVLSMPQVNIVKKTEVQTGGFSKESILPKRNSDKLIARKKDWDPKKYGGFESPTVAYSVLVVAKVEKGKSKKLKSVKELLGITIMERSSFEKNPIDFLEAKGYKEVKKDLIIKLPKYSLFELENGRKRMLASAGELQKGNELALPSKYVNFLYLASHYEKLKGSPEDNEQKQLFVEQHKHYLDEIIEQISEFSKRVILADANLDKVLSAYNKHRDKPIREQAENIIHLFTLTNLGAPAAFKYFDTTIDRKQYRSTKEVLDATLIHQSITGLYETRIDLSQLGGD

SEQ ID NO: 110 - protein, 1368 aa, Streptococcus pyogenes
MDKKYSIGLAIGTNSVGWAVITDEYKVPSKKFKVLGNTDRHSIKKNLIGALLFDSGETAEATRLKRTARRRYTRRKNRICYLQEIFSNEMAKVDDSFFHRLEESFLVEEDKKHERHPIFGNIVDEVAYHEKYPTIYHLRKKLVDSTDKADLRLIYLALAHMIKFRGHFLIEGDLNPDNSDVDKLFIQLVQTYNQLFEENPINASGVDAKAILSARLSKSRRLENLIAQLPGEKKNGLFGNLIALSLGLTPNFKSNFDLAEDAKLQLSKDTYDDDLDNLLAQIGDQYADLFLAAKNLSDAILLSDILRVNTEITKAPLSASMIKRYDEHHQDLTLLKALVRQQLPEKYKEIFFDQSKNGYAGYIDGGASQEEFYKFIKPILEKMDGTEELLVKLNREDLLRKQRTFDNGSIPHQIHLGELHAILRRQEDFYPFLKDNREKIEKILTFRIPYYVGPLARGNSRFAWMTRKSEETITPWNFEEVVDKGASAQSFIERMTNFDKNLPNEKVLPKHSLLYEYFTVYNELTKVKYVTEGMRKPAFLSGEQKKAIVDLLFKTNRKVTVKQLKEDYFKKIECFDSVEISGVEDRFNASLGTYHDLLKIIKDKDFLDNEENEDILEDIVLTLTLFEDREMIEERLKTYAHLFDDKVMKQLKRRRYTGWGRLSRKLINGIRDKQSGKTILDFLKSDGFANRNFMQLIHDDSLTFKEDIQKAQVSGQGDSLHEHIANLAGSPAIKKGILQTVKVVDELVKVMGRHKPENIVIEMARENQTTQKGQKNSRERMKRIEEGIKELGSQILKEHPVENTQLQNEKLYLYYLQNGRDMYVDQELDINRLSDYDVDHIVPQSFLKDDSIDNKVLTRSDKNRGKSDNVPSEEVVKKMKNYWRQLLNAKLITQRKFDNLTKAERGGLSELDKAGFIKRQLVETRQITKHVAQILDSRMNTKYDENDKLIREVKVITLKSKLVSDFRKDFQFYKVREINNYHHAHDAYLNAVVGTALIKKYPKLESEFVYGDYKVYDVRKMIAKSEQEIGKATAKYFFYSNIMNFFKTEITLANGEIRKRPLIETNGETGEIVWDKGRDFATVRKVLSMPQVNIVKKTEVQTGGFSKESILPKRNSDKLIARKKDWDPKKYGGFVSPTVAYSVLVVAKVEKGKSKKLKSVKELLGITIMERSSFEKNPIDFLEAKGYKEVKKDLIIKLPKYSLFELENGRKRMLASAGELQKGNELALPSKYVNFLYLASHYEKLKGSPEDNEQKQLFVEQHKHYLDEIIEQISEFSKRVILADANLDKVLSAYNKHRDKPIREQAENIIHLFTLTNLGAPAAFKYFDTTIDRKQYRSTKEVLDATLIHQSITGLYETRIDLSQLGGD

SEQ ID NO: 111 - protein, 1368 aa, Streptococcus pyogenes
MDKKYSIGLAIGTNSVGWAVITDEYKVPSKKFKVLGNTDRHSIKKNLIGALLFDSGETAEATRLKRTARRRYTRRKNRICYLQEIFSNEMAKVDDSFFHRLEESFLVEEDKKHERHPIFGNIVDEVAYHEKYPTIYHLRKKLVDSTDKADLRLIYLALAHMIKFRGHFLIEGDLNPDNSDVDKLFIQLVQTYNQLFEENPINASGVDAKAILSARLSKSRRLENLIAQLPGEKKNGLFGNLIALSLGLTPNFKSNFDLAEDAKLQLSKDTYDDDLDNLLAQIGDQYADLFLAAKNLSDAILLSDILRVNTEITKAPLSASMIKRYDEHHQDLTLLKALVRQQLPEKYKEIFFDQSKNGYAGYIDGGASQEEFYKFIKPILEKMDGTEELLVKLNREDLLRKQRTFDNGSIPHQIHLGELHAILRRQEDFYPFLKDNREKIEKILTFRIPYYVGPLARGNSRFAWMTRKSEETITPWNFEEVVDKGASAQSFIERMTNFDKNLPNEKVLPKHSLLYEYFTVYNELTKVKYVTEGMRKPAFLSGEQKKAIVDLLFKTNRKVTVKQLKEDYFKKIECFDSVEISGVEDRFNASLGTYHDLLKIIKDKDFLDNEENEDILEDIVLTLTLFEDREMIEERLKTYAHLFDDKVMKQLKRRRYTGWGRLSRKLINGIRDKQSGKTILDFLKSDGFANRNFMQLIHDDSLTFKEDIQKAQVSGQGDSLHEHIANLAGSPAIKKGILQTVKVVDELVKVMGRHKPENIVIEMARENQTTQKGQKNSRERMKRIEEGIKELGSQILKEHPVENTQLQNEKLYLYYLQNGRDMYVDQELDINRLSDYDVDHIVPQSFLKDDSIDNKVLTRSDKNRGKSDNVPSEEVVKKMKNYWRQLLNAKLITQRKFDNLTKAERGGLSELDKAGFIKRQLVETRQITKHVAQILDSRMNTKYDENDKLIREVKVITLKSKLVSDFRKDFQFYKVREINNYHHAHDAYLNAVVGTALIKKYPKLESEFVYGDYKVYDVRKMIAKSEQEIGKATAKYFFYSNIMNFFKTEITLANGEIRKRPLIETNGETGEIVWDKGRDFATVRKVLSMPQVNIVKKTEVQTGGFSKESILPKRNSDKLIARKKDWDPKKYGGFVSPTVAYSVLVVAKVEKGKSKKLKSVKELLGITIMERSSFEKNPIDFLEAKGYKEVKKDLIIKLPKYSLFELENGRKRMLASARELQKGNELALPSKYVNFLYLASHYEKLKGSPEDNEQKQLFVEQHKHYLDEIIEQISEFSKRVILADANLDKVLSAYNKHRDKPIREQAENIIHLFTLTNLGAPAAFKYFDTTIDRKEYRSTKEVLDATLIHQSITGLYETRIDLSQLGGD

SEQ ID NO: 112 - protein, 1359 aa, Artificial Sequence
  Description of Artificial Sequence: Synthetic polypeptide
MDKKYSIGLDIGTNSVGWAVITDDYKVPSKKFKVLGNTDRHSIKKNLIGALLFGSGETAEATRLKRTARRRYTRRKNRICYLQEIFSNEMAKVDDSFFHRLEESFLVEEDKKHERHPIFGNIVDEVAYHEKYPTIYHLRKKLADSTDKADLRLIYLALAHMIKFRGHFLIEGDLNPDNSDVDKLFIQLVQIYNQLFEENPINASRVDAKAILSARLSKSRRLENLIAQLPGEKRNGLFGNLIALSLGLTPNFKSNFDLAEDAKLQLSKDTYDDDLDNLLAQIGDQYADLFLAAKNLSDAILLSDILRVNSEITKAPLSASMIKRYDEHHQDLTLLKALVRQQLPEKYKEIFFDQSKNGYAGYIDGGASQEEFYKFIKPILEKMDGTEELLVKLNREDLLRKQRTFDNGSIPHQIHLGELHAILRRQEDFYPFLKDNREKIEKILTFRIPYYVGPLARGNSRFAWMTRKSEETITPWNFEEVVDKGASAQSFIERMTNFDKNLPNEKVLPKHSLLYEYFTVYNELTKVKYVTEGMRKPAFLSGEQKKAIVDLLFKTNRKVTVKQLKEDYFKKIECFDSVEISGVEDRFNASLGAYHDLLKIIKDKDFLDNEENEDILEDIVLTLTLFEDRGMIEERLKTYAHLFDDKVMKQLKRRRYTGWGRLSRKLINGIRDKQSGKTILDFLKSDGFANRNFMQLIHDDSLTFKEDIQKAQVSGQGHSLHEQIANLAGSPAIKKGILQTVKIVDELVKVMGHKPENIVIEMARENQTTQKGQKNSRERMKRIEEGIKELGSQILKEHPVENTQLQNEKLYLYYLQNGRDMYVDQELDINRLSDYDVDHIVPQSFIKDDSIDNKVLTRSDKNRGKSDNVPSEEVVKKMKNYWRQLLNAKLITQRKFDNLTKAERGGLSELDKAGFIKRQLVETRQITKHVAQILDSRMNTKYDENDKLIREVKVITLKSKLVSDFRKDFQFYKVREINNYHHAHDAYLNAVVGTALIKKYPKLESEFVYGDYKVYDVRKMIAKSEQEIGKATAKYFFYSNIMNFFKTEITLANGEIRKRPLIETNGETGEIVWDKGRDFATVRKVLSMPQVNIVKKTEIQTVGQNGGLFDDNPKSPLEVTPSKLVPLKKELNPKKYGGYQKPTTAYPVLLITDTKQLIPISVMNKKQFEQNPVKFLRDRGYQQVGKNDFIKLPKYTLVDIGDGIKRLWASSKEIHKGNQLVVSKKSQILLYHAHHLDSDLSNDYLQNHNQQFDVLFNEIISFSKKCKLGKEHIQKIENVYSNKKNSASIEELAESFIKLLGFTQLGATSPFNFLGVKLNQKQYKGKKDYILPCTEGTLIRQSITGLYETRVDLSKIGED

SEQ ID NO: 113 - protein, 29 aa, Artificial Sequence
  Description of Artificial Sequence: Synthetic peptide
PKKKRKVEGADKRTADGSEFESPKKKRKV

SEQ ID NO: 114 - protein, 23 aa, Artificial Sequence
  Description of Artificial Sequence: Synthetic peptide
RKSGKIAAIVVKRPRKPKKKRKV

SEQ ID NO: 115 - protein, 4 aa, Artificial Sequence
  Description of Artificial Sequence: Synthetic peptide
GGGS

SEQ ID NO: 116 - protein, 5 aa, Artificial Sequence
  Description of Artificial Sequence: Synthetic peptide
GGGGS

SEQ ID NO: 117 - protein, 5 aa, Artificial Sequence
  Description of Artificial Sequence: Synthetic peptide
EAAAK

SEQ ID NO: 118 - protein, 6 aa, Artificial Sequence
  Description of Artificial Sequence: Synthetic peptide
GGSGGS

SEQ ID NO: 119 - protein, 20 aa, Artificial Sequence
  Description of Artificial Sequence: Synthetic peptide
GSSGSETPGTSESATPESSG

SEQ ID NO: 120 - DNA, 18 bp, Artificial Sequence
  Description of Artificial Sequence: Synthetic oligonucleotide
ggaggctctggaggaagc

SEQ ID NO: 121 - DNA, 60 bp, Artificial Sequence
  Description of Artificial Sequence: Synthetic oligonucleotide
ggctcttctggatctgaaacacctggcacaagcgagagcgccacccctgagagctctggc

SEQ ID NO: 122 - protein, 17 aa, Artificial Sequence
  Description of Artificial Sequence: Synthetic peptide
MAPKKKRKVGIHGVPAA

SEQ ID NO: 123 - DNA, 51 bp, Artificial Sequence
  Description of Artificial Sequence: Synthetic oligonucleotide
atggccccaaagaagaagcggaaggtcggtatccacggagtcccagcagcc

SEQ ID NO: 124 - protein, 1554 aa, Artificial Sequence
  Description of Artificial Sequence: Synthetic polypeptide
MDKKYSIGLAIGTNSVGWAVITDEYKVPSKKFKVLGNTDRHSIKKNLIGALLFDSGETAEATRLKRTARRRYTRRKNRICYLQEIFSNEMAKVDDSFFHRLEESFLVEEDKKHERHPIFGNIVDEVAYHEKYPTIYHLRKKLVDSTDKADLRLIYLALAHMIKFRGHFLIEGDLNPDNSDVDKLFIQLVQTYNQLFEENPINASGVDAKAILSARLSKSRRLENLIAQLPGEKKNGLFGNLIALSLGLTPNFKSNFDLAEDAKLQLSKDTYDDDLDNLLAQIGDQYADLFLAAKNLSDAILLSDILRVNTEITKAPLSASMIKRYDEHHQDLTLLKALVRQQLPEKYKEIFFDQSKNGYAGYIDGGASQEEFYKFIKPILEKMDGTEELLVKLNREDLLRKQRTFDNGSIPHQIHLGELHAILRRQEDFYPFLKDNREKIEKILTFRIPYYVGPLARGNSRFAWMTRKSEETITPWNFEEVVDKGASAQSFIERMTNFDKNLPNEKVLPKHSLLYEYFTVYNELTKVKYVTEGMRKPAFLSGEQKKAIVDLLFKTNRKVTVKQLKEDYFKKIECFDSVEISGVEDRFNASLGTYHDLLKIIKDKDFLDNEENEDILEDIVLTLTLFEDREMIEERLKTYAHLFDDKVMKQLKRRRYTGWGRLSRKLINGIRDKQSGKTILDFLKSDGFANRNFMQLIHDDSLTFKEDIQKAQVSGQGDSLHEHIANLAGSPAIKKGILQTVKVVDELVKVMGRHKPENIVIEMARENQTTQKGQKNSRERMKRIEEGIKELGSQILKEHPVENTQLQNEKLYLYYLQNGRDMYVDQELDINRLSDYDVDHIVPQSFLKDDSIDNKVLTRSDKNRGKSDNVPSEEVVKKMKNYWRQLLNAKLITQRKFDNLTKAERGGLSELDKAGFIKRQLVETRQITKHVAQILDSRMNTKYDENDKLIREVKVITLKSKLVSDFRKDFQFYKVREINNYHHAHDAYLNAVVGTALIKKYPKLESEFVYGDYKVGSSGSETPGTSESATPESSGSEVEFSHEYWMRHALTLAKRARDEREVPVGAVLVLNNRVIGEGWNRAIGLHDPTAHAEIMALRQGGLVMQNYRLIDATLYVTFEPCVMCAGAMIHSRIGRVVFGVRNAKTGAAGSLMDVLHYPGMNHRVEITEGILADECAALLCYFFRMPRQVFNAQKKAQSSTDYDVRKMIAKSEQEIGKATAKYFFYSNIMNFFKTEITLANGEIRKRPLIETNGETGEIVWDKGRDFATVRKVLSMPQVNIVKKTEVQTGGFSKESILPKRNSDKLIARKKDWDPKKYGGFDSPTVAYSVLVVAKVEKGKSKKLKSVKELLGITIMERSSFEKNPIDFLEAKGYKEVKKDLIIKLPKYSLFELENGRKRMLASAGELQKGNELALPSKYVNFLYLASHYEKLKGSPEDNEQKQLFVEQHKHYLDEIIEQISEFSKRVILADANLDKVLSAYNKHRDKPIREQAENIIHLFTLTNLGAPAAFKYFDTTIDRKRYTSTKEVLDATLIHQSITGLYETRIDLSQLGGD

SEQ ID NO: 125 - protein, 1554 aa, Artificial Sequence
  Description of Artificial Sequence: Synthetic polypeptide
MDKKYSIGLAIGTNSVGWAVITDEYKVPSKKFKVLGNTDRHSIKKNLIGALLFDSGETAEATRLKRTARRRYTRRKNRICYLQEIFSNEMAKVDDSFFHRLEESFLVEEDKKHERHPIFGNIVDEVAYHEKYPTIYHLRKKLVDSTDKADLRLIYLALAHMIKFRGHFLIEGDLNPDNSDVDKLFIQLVQTYNQLFEENPINASGVDAKAILSARLSKSRRLENLIAQLPGEKKNGLFGNLIALSLGLTPNFKSNFDLAEDAKLQLSKDTYDDDLDNLLAQIGDQYADLFLAAKNLSDAILLSDILRVNTEITKAPLSASMIKRYDEHHQDLTLLKALVRQQLPEKYKEIFFDQSKNGYAGYIDGGASQEEFYKFIKPILEKMDGTEELLVKLNREDLLRKQRTFDNGSIPHQIHLGELHAILRRQEDFYPFLKDNREKIEKILTFRIPYYVGPLARGNSRFAWMTRKSEETITPWNFEEVVDKGASAQSFIERMTNFDKNLPNEKVLPKHSLLYEYFTVYNELTKVKYVTEGMRKPAFLSGEQKKAIVDLLFKTNRKVTVKQLKEDYFKKIECFDSVEISGVEDRFNASLGTYHDLLKIIKDKDFLDNEENEDILEDIVLTLTLFEDREMIEERLKTYAHLFDDKVMKQLKRRRYTGWGRLSRKLINGIRDKQSGKTILDFLKSDGFANRNFMQLIHDDSLTFKEDIQKAQVSGQGDSLHEHIANLAGSPAIKKGILQTVKVVDELVKVMGRHKPENIVIEMARENQTTQKGQKNSRERMKRIEEGIKELGSQILKEHPVENTQLQNEKLYLYYLQNGRDMYVDQELDINRLSDYDVDHIVPQSFLKDDSIDNKVLTRSDKNRGKSDNVPSEEVVKKMKNYWRQLLNAKLITQRKFDNLTKAERGGLSELDKAGFIKRQLVETRQITKHVAQILDSRMNTKYDENDKLIREVKVITLKSKLVSDFRKDFQFYKVREINNYHHAHDAYLNAVVGTALIKKYPKLESEFVYGDYKVYDVRKMIGSSGSETPGTSESATPESSGSEVEFSHEYWMRHALTLAKRARDEREVPVGAVLVLNNRVIGEGWNRAIGLHDPTAHAEIMALRQGGLVMQNYRLIDATLYVTFEPCVMCAGAMIHSRIGRVVFGVRNAKTGAAGSLMDVLHYPGMNHRVEITEGILADECAALLCYFFRMPRQVFNAQKKAQSSTDAKSEQEIGKATAKYFFYSNIMNFFKTEITLANGEIRKRPLIETNGETGEIVWDKGRDFATVRKVLSMPQVNIVKKTEVQTGGFSKESILPKRNSDKLIARKKDWDPKKYGGFDSPTVAYSVLVVAKVEKGKSKKLKSVKELLGITIMERSSFEKNPIDFLEAKGYKEVKKDLIIKLPKYSLFELENGRKRMLASAGELQKGNELALPSKYVNFLYLASHYEKLKGSPEDNEQKQLFVEQHKHYLDEIIEQISEFSKRVILADANLDKVLSAYNKHRDKPIREQAENIIHLFTLTNLGAPAAFKYFDTTIDRKRYTSTKEVLDATLIHQSITGLYETRIDLSQLGGD

SEQ ID NO: 126 - protein, 1554 aa, Artificial Sequence
  Description of Artificial Sequence: Synthetic polypeptide
MDKKYSIGLAIGTNSVGWAVITDEYKVPSKKFKVLGNTDRHSIKKNLIGALLFDSGETAEATRLKRTARRRYTRRKNRICYLQEIFSNEMAKVDDSFFHRLEESFLVEEDKKHERHPIFGNIVDEVAYHEKYPTIYHLRKKLVDSTDKADLRLIYLALAHMIKFRGHFLIEGDLNPDNSDVDKLFIQLVQTYNQLFEENPINASGVDAKAILSARLSKSRRLENLIAQLPGEKKNGLFGNLIALSLGLTPNFKSNFDLAEDAKLQLSKDTYDDDLDNLLAQIGDQYADLFLAAKNLSDAILLSDILRVNTEITKAPLSASMIKRYDEHHQDLTLLKALVRQQLPEKYKEIFFDQSKNGYAGYIDGGASQEEFYKFIKPILEKMDGTEELLVKLNREDLLRKQRTFDNGSIPHQIHLGELHAILRRQEDFYPFLKDNREKIEKILTFRIPYYVGPLARGNSRFAWMTRKSEETITPWNFEEVVDKGASAQSFIERMTNFDKNLPNEKVLPKHSLLYEYFTVYNELTKVKYVTEGMRKPAFLSGEQKKAIVDLLFKTNRKVTVKQLKEDYFKKIECFDSVEISGVEDRFNASLGTYHDLLKIIKDKDFLDNEENEDILEDIVLTLTLFEDREMIEERLKTYAHLFDDKVMKQLKRRRYTGWGRLSRKLINGIRDKQSGKTILDFLKSDGFANRNFMQLIHDDSLTFKEDIQKAQVSGQGDSLHEHIANLAGSPAIKKGILQTVKVVDELVKVMGRHKPENIVIEMARENQTTQKGQKNSRERMKRIEEGIKELGSQILKEHPVENTQLQNEKLYLYYLQNGRDMYVDQELDINRLSDYDVDHIVPQSFLKDDSIDNKVLTRSDKNRGKSDNVPSEEVVKKMKNYWRQLLNAKLITQRKFDNLTKAERGGLSELDKAGFIKRQLVETRQITKHVAQILDSRMNTKYDENDKLIREVKVITLKSKLVSDFRKDFQFYKVREINNYHHAHDAYLNAVVGTALIKKYPKLESEFVYGDYKVYDVRKMIAKSEQEIGSSGSETPGTSESATPESSGSEVEFSHEYWMRHALTLAKRARDEREVPVGAVLVLNNRVIGEGWNRAIGLHDPTAHAEIMALRQGGLVMQNYRLIDATLYVTFEPCVMCAGAMIHSRIGRVVFGVRNAKTGAAGSLMDVLHYPGMNHRVEITEGILADECAALLCYFFRMPRQVFNAQKKAQSSTDGKATAKYFFYSNIMNFFKTEITLANGEIRKRPLIETNGETGEIVWDKGRDFATVRKVLSMPQVNIVKKTEVQTGGFSKESILPKRNSDKLIARKKDWDPKKYGGFDSPTVAYSVLVVAKVEKGKSKKLKSVKELLGITIMERSSFEKNPIDFLEAKGYKEVKKDLIIKLPKYSLFELENGRKRMLASAGELQKGNELALPSKYVNFLYLASHYEKLKGSPEDNEQKQLFVEQHKHYLDEIIEQISEFSKRVILADANLDKVLSAYNKHRDKPIREQAENIIHLFTLTNLGAPAAFKYFDTTIDRKRYTSTKEVLDATLIHQSITGLYETRIDLSQLGGD

SEQ ID NO: 127 - protein, 1554 aa, Artificial Sequence
  Description of Artificial Sequence: Synthetic polypeptide
MDKKYSIGLAIGTNSVGWAVITDEYKVPSKKFKVLGNTDRHSIKKNLIGALLFDSGETAEATRLKRTARRRYTRRKNRICYLQEIFSNEMAKVDDSFFHRLEESFLVEEDKKHERHPIFGNIVDEVAYHEKYPTIYHLRKKLVDSTDKADLRLIYLALAHMIKFRGHFLIEGDLNPDNSDVDKLFIQLVQTYNQLFEENPINASGVDAKAILSARLSKSRRLENLIAQLPGEKKNGLFGNLIALSLGLTPNFKSNFDLAEDAKLQLSKDTYDDDLDNLLAQIGDQYADLFLAAKNLSDAILLSDILRVNTEITKAPLSASMIKRYDEHHQDLTLLKALVRQQLPEKYKEIFFDQSKNGYAGYIDGGASQEEFYKFIKPILEKMDGTEELLVKLNREDLLRKQRTFDNGSIPHQIHLGELHAILRRQEDFYPFLKDNREKIEKILTFRIPYYVGPLARGNSRFAWMTRKSEETITPWNFEEVVDKGASAQSFIERMTNFDKNLPNEKVLPKHSLLYEYFTVYNELTKVKYVTEGMRKPAFLSGEQKKAIVDLLFKTNRKVTVKQLKEDYFKKIECFDSVEISGVEDRFNASLGTYHDLLKIIKDKDFLDNEENEDILEDIVLTLTLFEDREMIEERLKTYAHLFDDKVMKQLKRRRYTGWGRLSRKLINGIRDKQSGKTILDFLKSDGFANRNFMQLIHDDSLTFKEDIQKAQVSGQGDSLHEHIANLAGSPAIKKGILQTVKVVDELVKVMGRHKPENIVIEMARENQTTQKGQKNSRERMKRIEEGIKELGSQILKEHPVENTQLQNEKLYLYYLQNGRDMYVDQELDINRLSDYDVDHIVPQSFLKDDSIDNKVLTRSDKNRGKSDNVPSEEVVKKMKNYWRQLLNAKLITQRKFDNLTKAERGGLSELDKAGFIKRQLVETRQITKHVAQILDSRMNTKYDENDKLIREVKVITLKSKLVSDFRKDFQFYKVREINNYHHAHDAYLNAVVGTALIKKYPKLESEFVYGDYKVYDVRKMIAKSEQEIGKATAKYFFYSGSSGSETPGTSESATPESSGSEVEFSHEYWMRHALTLAKRARDEREVPVGAVLVLNNRVIGEGWNRAIGLHDPTAHAEIMALRQGGLVMQNYRLIDATLYVTFEPCVMCAGAMIHSRIGRVVFGVRNAKTGAAGSLMDVLHYPGMNHRVEITEGILADECAALLCYFFRMPRQVFNAQKKAQSSTDNIMNFFKTEITLANGEIRKRPLIETNGETGEIVWDKGRDFATVRKVLSMPQVNIVKKTEVQTGGFSKESILPKRNSDKLIARKKDWDPKKYGGFDSPTVAYSVLVVAKVEKGKSKKLKSVKELLGITIMERSSFEKNPIDFLEAKGYKEVKKDLIIKLPKYSLFELENGRKRMLASAGELQKGNELALPSKYVNFLYLASHYEKLKGSPEDNEQKQLFVEQHKHYLDEIIEQISEFSKRVILADANLDKVLSAYNKHRDKPIREQAENIIHLFTLTNLGAPAAFKYFDTTIDRKRYTSTKEVLDATLIHQSITGLYETRIDLSQLGGD

SEQ ID NO: 128 - protein, 1554 aa, Artificial Sequence
  Description of Artificial Sequence: Synthetic polypeptide
MDKKYSIGLAIGTNSVGWAVITDEYKVPSKKFKVLGNTDRHSIKKNLIGALLFDSGETAEATRLKRTARRRYTRRKNRICYLQEIFSNEMAKVDDSFFHRLEESFLVEEDKKHERHPIFGNIVDEVAYHEKYPTIYHLRKKLVDSTDKADLRLIYLALAHMIKFRGHFLIEGDLNPDNSDVDKLFIQLVQTYNQLFEENPINASGVDAKAILSARLSKSRRLENLIAQLPGEKKNGLFGNLIALSLGLTPNFKSNFDLAEDAKLQLSKDTYDDDLDNLLAQIGDQYADLFLAAKNLSDAILLSDILRVNTEITKAPLSASMIKRYDEHHQDLTLLKALVRQQLPEKYKEIFFDQSKNGYAGYIDGGASQEEFYKFIKPILEKMDGTEELLVKLNREDLLRKQRTFDNGSIPHQIHLGELHAILRRQEDFYPFLKDNREKIEKILTFRIPYYVGPLARGNSRFAWMTRKSEETITPWNFEEVVDKGASAQSFIERMTNFDKNLPNEKVLPKHSLLYEYFTVYNELTKVKYVTEGMRKPAFLSGEQKKAIVDLLFKTNRKVTVKQLKEDYFKKIECFDSVEISGVEDRFNASLGTYHDLLKIIKDKDFLDNEENEDILEDIVLTLTLFEDREMIEERLKTYAHLFDDKVMKQLKRRRYTGWGRLSRKLINGIRDKQSGKTILDFLKSDGFANRNFMQLIHDDSLTFKEDIQKAQVSGQGDSLHEHIANLAGSPAIKKGILQTVKVVDELVKVMGRHKPENIVIEMARENQTTQKGQKNSRERMKRIEEGIKELGSQILKEHPVENTQLQNEKLYLYYLQNGRDMYVDQELDINRLSDYDVDHIVPQSFLKDDSIDNKVLTRSDKNRGKSDNVPSEEVVKKMKNYWRQLLNAKLITQRKFDNLTKAERGGLSELDKAGFIKRQLVETRQITKHVAQILDSRMNTKYDENDKLIREVKVITLKSKLVSDFRKDFQFYKVREINNYHHAHDAYLNAVVGTALIKKYPKLESEFVYGDYKVYDVRKMIAKSEQEIGKATAKYFFYSNIMNFFKTEITLANGEIRKRPLIETNGEGSSGSETPGTSESATPESSGSEVEFSHEYWMRHALTLAKRARDEREVPVGAVLVLNNRVIGEGWNRAIGLHDPTAHAEIMALRQGGLVMQNYRLIDATLYVTFEPCVMCAGAMIHSRIGRVVFGVRNAKTGAAGSLMDVLHYPGMNHRVEITEGILADECAALLCYFFRMPRQVFNAQKKAQSSTDTGEIVWDKGRDFATVRKVLSMPQVNIVKKTEVQTGGFSKESILPKRNSDKLIARKKDWDPKKYGGFDSPTVAYSVLVVAKVEKGKSKKLKSVKELLGITIMERSSFEKNPIDFLEAKGYKEVKKDLIIKLPKYSLFELENGRKRMLASAGELQKGNELALPSKYVNFLYLASHYEKLKGSPEDNEQKQLFVEQHKHYLDEIIEQISEFSKRVILADANLDKVLSAYNKHRDKPIREQAENIIHLFTLTNLGAPAAFKYFDTTIDRKRYTSTKEVLDATLIHQSITGLYETRIDLSQLGGD

SEQ ID NO: 129 - protein, 1554 aa, Artificial Sequence
  Description of Artificial Sequence: Synthetic polypeptide
MDKKYSIGLAIGTNSVGWAVITDEYKVPSKKFKVLGNTDRHSIKKNLIGALLFDSGETAEATRLKRTARRRYTRRKNRICYLQEIFSNEMAKVDDSFFHRLEESFLVEEDKKHERHPIFGNIVDEVAYHEKYPTIYHLRKKLVDSTDKADLRLIYLALAHMIKFRGHFLIEGDLNPDNSDVDKLFIQLVQTYNQLFEENPINASGVDAKAILSARLSKSRRLENLIAQLPGEKKNGLFGNLIALSLGLTPNFKSNFDLAEDAKLQLSKDTYDDDLDNLLAQIGDQYADLFLAAKNLSDAILLSDILRVNTEITKAPLSASMIKRYDEHHQDLTLLKALVRQQLPEKYKEIFFDQSKNGYAGYIDGGASQEEFYKFIKPILEKMDGTEELLVKLNREDLLRKQRTFDNGSIPHQIHLGELHAILRRQEDFYPFLKDNREKIEKILTFRIPYYVGPLARGNSRFAWMTRKSEETITPWNFEEVVDKGASAQSFIERMTNFDKNLPNEKVLPKHSLLYEYFTVYNELTKVKYVTEGMRKPAFLSGEQKKAIVDLLFKTNRKVTVKQLKEDYFKKIECFDSVEISGVEDRFNASLGTYHDLLKIIKDKDFLDNEENEDILEDIVLTLTLFEDREMIEERLKTYAHLFDDKVMKQLKRRRYTGWGRLSRKLINGIRDKQSGKTILDFLKSDGFANRNFMQLIHDDSLTFKEDIQKAQVSGQGDSLHEHIANLAGSPAIKKGILQTVKVVDELVKVMGRHKPENIVIEMARENQTTQKGQKNSRERMKRIEEGIKELGSQILKEHPVENTQLQNEKLYLYYLQNGRDMYVDQELDINRLSDYDVDHIVPQSFLKDDSIDNKVLTRSDKNRGKSDNVPSEEVVKKMKNYWRQLLNAKLITQRKFDNLTKAERGGLSELDKAGFIKRQLVETRQITKHVAQILDSRMNTKYDENDKLIREVKVITLKSKLVSDFRKDFQFYKVREINNYHHAHDAYLNAVVGTALIKKYPKLESEFVYGDYKVYDVRKMIAKSEQEIGKATAKYFFYSNIMNFFKTEITLANGEIRKRPLIETNGETGEIVWDKGRDFATVRKVLSMPQVNIVKKTEVQTGGFSKESILPKRNSDKLIARKKDWDPKKYGGFDSPTVAYSVLVVAKVEKGKSKKLKSVKELLGITIMERSSFEKNPIDFLEAKGYKEVKKDLIIKLPKYSLFELENGRKRMLASAGELQKGNELALPSKYVNFLYLASHYEKLKGGSSGSETPGTSESATPESSGSEVEFSHEYWMRHALTLAKRARDEREVPVGAVLVLNNRVIGEGWNRAIGLHDPTAHAEIMALRQGGLVMQNYRLIDATLYVTFEPCVMCAGAMIHSRIGRVVFGVRNAKTGAAGSLMDVLHYPGMNHRVEITEGILADECAALLCYFFRMPRQVFNAQKKAQSSTDSPEDNEQKQLFVEQHKHYLDEIIEQISEFSKRVILADANLDKVLSAYNKHRDKPIREQAENIIHLFTLTNLGAPAAFKYFDTTIDRKRYTSTKEVLDATLIHQSITGLYETRIDLSQLGGD

SEQ ID NO: 130 - protein, 1554 aa, Artificial Sequence
  Description of Artificial Sequence: Synthetic polypeptide
MDKKYSIGLAIGTNSVGWAVITDEYKVPSKKFKVLGNTDRHSIKKNLIGALLFDSGETAEATRLKRTARRRYTRRKNRICYLQEIFSNEMAKVDDSFFHRLEESFLVEEDKKHERHPIFGNIVDEVAYHEKYPTIYHLRKKLVDSTDKADLRLIYLALAHMIKFRGHFLIEGDLNPDNSDVDKLFIQLVQTYNQLFEENPINASGVDAKAILSARLSKSRRLENLIAQLPGEKKNGLFGNLIALSLGLTPNFKSNFDLAEDAKLQLSKDTYDDDLDNLLAQIGDQYADLFLAAKNLSDAILLSDILRVNTEITKAPLSASMIKRYDEHHQDLTLLKALVRQQLPEKYKEIFFDQSKNGYAGYIDGGASQEEFYKFIKPILEKMDGTEELLVKLNREDLLRKQRTFDNGSIPHQIHLGELHAILRRQEDFYPFLKDNREKIEKILTFRIPYYVGPLARGNSRFAWMTRKSEETITPWNFEEVVDKGASAQSFIERMTNFDKNLPNEKVLPKHSLLYEYFTVYNELTKVKYVTEGMRKPAFLSGEQKKAIVDLLFKTNRKVTVKQLKEDYFKKIECFDSVEISGVEDRFNASLGTYHDLLKIIKDKDFLDNEENEDILEDIVLTLTLFEDREMIEERLKTYAHLFDDKVMKQLKRRRYTGWGRLSRKLINGIRDKQSGKTILDFLKSDGFANRNFMQLIHDDSLTFKEDIQKAQVSGQGDSLHEHIANLAGSPAIKKGILQTVKVVDELVKVMGRHKPENIVIEMARENQTTQKGQKNSRERMKRIEEGIKELGSQILKEHPVENTQLQNEKLYLYYLQNGRDMYVDQELDINRLSDYDVDHIVPQSFLKDDSIDNKVLTRSDKNRGKSDNVPSEEVVKKMKNYWRQLLNAKLITQRKFDNLTKAERGGLSELDKAGFIKRQLVETRQITKHVAQILDSRMNTKYDENDKLIREVKVITLKSKLVSDFRKDFQFYKVREINNYHHAHDAYLNAVVGTALIKKYPKLESEFVYGDYKVYDVRKMIAKSEQEIGKATAKYFFYSNIMNFFKTEITLANGSSGSETPGTSESATPESSGSEVEFSHEYWMRHALTLAKRARDEREVPVGAVLVLNNRVIGEGWNRAIGLHDPTAHAEIMALRQGGLVMQNYRLIDATLYVTFEPCVMCAGAMIHSRIGRVVFGVRNAKTGAAGSLMDVLHYPGMNHRVEITEGILADECAALLCYFFRMPRQVFNAQKKAQSSTDGEIRKRPLIETNGETGEIVWDKGRDFATVRKVLSMPQVNIVKKTEVQTGGFSKESILPKRNSDKLIARKKDWDPKKYGGFDSPTVAYSVLVVAKVEKGKSKKLKSVKELLGITIMERSSFEKNPIDFLEAKGYKEVKKDLIIKLPKYSLFELENGRKRMLASAGELQKGNELALPSKYVNFLYLASHYEKLKGSPEDNEQKQLFVEQHKHYLDEIIEQISEFSKRVILADANLDKVLSAYNKHRDKPIREQAENIIHLFTLTNLGAPAAFKYFDTTIDRKRYTSTKEVLDATLIHQSITGLYETRIDLSQLGGD

SEQ ID NO: 131 - protein, 1554 aa, Artificial Sequence
  Description of Artificial Sequence: Synthetic polypeptide
MDKKYSIGLAIGTNSVGWAVITDEYKVPSKKFKVLGNTDRHSIKKNLIGALLFDSGETAEATRLKRTARRRYTRRKNRICYLQEIFSNEMAKVDDSFFHRLEESFLVEEDKKHERHPIFGNIVDEVAYHEKYPTIYHLRKKLVDSTDKADLRLIYLALAHMIKFRGHFLIEGDLNPDNSDVDKLFIQLVQTYNQLFEENPINASGVDAKAILSARLSKSRRLENLIAQLPGEKKNGLFGNLIALSLGLTPNFKSNFDLAEDAKLQLSKDTYDDDLDNLLAQIGDQYADLFLAAKNLSDAILLSDILRVNTEITKAPLSASMIKRYDEHHQDLTLLKALVRQQLPEKYKEIFFDQSKNGYAGYIDGGASQEEFYKFIKPILEKMDGTEELLVKLNREDLLRKQRTFDNGSIPHQIHLGELHAILRRQEDFYPFLKDNREKIEKILTFRIPYYVGPLARGNSRFAWMTRKSEETITPWNFEEVVDKGASAQSFIERMTNFDKNLPNEKVLPKHSLLYEYFTVYNELTKVKYVTEGMRKPAFLSGEQKKAIVDLLFKTNRKVTVKQLKEDYFKKIECFDSVEISGVEDRFNASLGTYHDLLKIIKDKDFLDNEENEDILEDIVLTLTLFEDREMIEERLKTYAHLFDDKVMKQLKRRRYTGWGRLSRKLINGIRDKQSGKTILDFLKSDGFANRNFMQLIHDDSLTFKEDIQKAQVSGQGDSLHEHIANLAGSPAIKKGILQTVKVVDELVKVMGRHKPENIVIEMARENQTTQKGQKNSRERMKRIEEGIKELGSQILKEHPVENTQLQNEKLYLYYLQNGRDMYVDQELDINRLSDYDVDHIVPQSFLKDDSIDNKVLTRSDKNRGKSDNVPSEEVVKKMKNYWRQLLNAKLITQRKFDNLTKAERGGLSELDKAGFIKRQLVETRQITKHVAQILDSRMNTKYDENDKLIREVKVITLKSKLVSDFRKDFQFYKVREINNYHHAHDAYLNAVVGTALIKKYPKLESEFVYGDYKVYDVRKMIAKSEGSSGSETPGTSESATPESSGSEVEFSHEYWMRHALTLAKRARDEREVPVGAVLVLNNRVIGEGWNRAIGLHDPTAHAEIMALRQGGLVMQNYRLIDATLYVTFEPCVMCAGAMIHSRIGRVVFGVRNAKTGAAGSLMDVLHYPGMNHRVEITEGILADECAALLCYFFRMPRQVFNAQKKAQSSTDQEIGKATAKYFFYSNIMNFFKTEITLANGEIRKRPLIETNGETGEIVWDKGRDFATVRKVLSMPQVNIVKKTEVQTGGFSKESILPKRNSDKLIARKKDWDPKKYGGFDSPTVAYSVLVVAKVEKGKSKKLKSVKELLGITIMERSSFEKNPIDFLEAKGYKEVKKDLIIKLPKYSLFELENGRKRMLASAGELQKGNELALPSKYVNFLYLASHYEKLKGSPEDNEQKQLFVEQHKHYLDEIIEQISEFSKRVILADANLDKVLSAYNKHRDKPIREQAENIIHLFTLTNLGAPAAFKYFDTTIDRKRYTSTKEVLDATLIHQSITGLYETRIDLSQLGGD

SEQ ID NO: 132 - protein, 1540 aa, Artificial Sequence
  Description of Artificial Sequence: Synthetic polypeptide
MDKKYSIGLAIGTNSVGWAVITDEYKVPSKKFKVLGNTDRHSIKKNLIGALLFDSGETAEATRLKRTARRRYTRRKNRICYLQEIFSNEMAKVDDSFFHRLEESFLVEEDKKHERHPIFGNIVDEVAYHEKYPTIYHLRKKLVDSTDKADLRLIYLALAHMIKFRGHFLIEGDLNPDNSDVDKLFIQLVQTYNQLFEENPINASGVDAKAILSARLSKSRRLENLIAQLPGEKKNGLFGNLIALSLGLTPNFKSNFDLAEDAKLQLSKDTYDDDLDNLLAQIGDQYADLFLAAKNLSDAILLSDILRVNTEITKAPLSASMIKRYDEHHQDLTLLKALVRQQLPEKYKEIFFDQSKNGYAGYIDGGASQEEFYKFIKPILEKMDGTEELLVKLNREDLLRKQRTFDNGSIPHQIHLGELHAILRRQEDFYPFLKDNREKIEKILTFRIPYYVGPLARGNSRFAWMTRKSEETITPWNFEEVVDKGASAQSFIERMTNFDKNLPNEKVLPKHSLLYEYFTVYNELTKVKYVTEGMRKPAFLSGEQKKAIVDLLFKTNRKVTVKQLKEDYFKKIECFDSVEISGVEDRFNASLGTYHDLLKIIKDKDFLDNEENEDILEDIVLTLTLFEDREMIEERLKTYAHLFDDKVMKQLKRRRYTGWGRLSRKLINGIRDKQSGKTILDFLKSDGFANRNFMQLIHDDSLTFKEDIQKAQVSGQGDSLHEHIANLAGSPAIKKGILQTVKVVDELVKVMGRHKPENIVIEMARENQGSSGSETPGTSESATPESSGSEVEFSHEYWMRHALTLAKRARDEREVPVGAVLVLNNRVIGEGWNRAIGLHDPTAHAEIMALRQGGLVMQNYRLIDATLYVTFEPCVMCAGAMIHSRIGRVVFGVRNAKTGAAGSLMDVLHYPGMNHRVEITEGILADECAALLCYFFRMPRTTQKGQKNSRERMKRIEEGIKELGSQILKEHPVENTQLQNEKLYLYYLQNGRDMYVDQELDINRLSDYDVDHIVPQSFLKDDSIDNKVLTRSDKNRGKSDNVPSEEVVKKMKNYWRQLLNAKLITQRKFDNLTKAERGGLSELDKAGFIKRQLVETRQITKHVAQILDSRMNTKYDENDKLIREVKVITLKSKLVSDFRKDFQFYKVREINNYHHAHDAYLNAVVGTALIKKYPKLESEFVYGDYKVYDVRKMIAKSEQEIGKATAKYFFYSNIMNFFKTEITLANGEIRKRPLIETNGETGEIVWDKGRDFATVRKVLSMPQVNIVKKTEVQTGGFSKESILPKRNSDKLIARKKDWDPKKYGGFDSPTVAYSVLVVAKVEKGKSKKLKSVKELLGITIMERSSFEKNPIDFLEAKGYKEVKKDLIIKLPKYSLFELENGRKRMLASAGELQKGNELALPSKYVNFLYLASHYEKLKGSPEDNEQKQLFVEQHKHYLDEIIEQISEFSKRVILADANLDKVLSAYNKHRDKPIREQAENIIHLFTLTNLGAPAAFKYFDTTIDRKRYTSTKEVLDATLIHQSITGLYETRIDLSQLGGD

SEQ ID NO: 133 - protein, 1540 aa, Artificial Sequence
  Description of Artificial Sequence: Synthetic polypeptide
MDKKYSIGLAIGTNSVGWAVITDEYKVPSKKFKVLGNTDRHSIKKNLIGALLFDSGETAEATRLKRTARRRYTRRKNRICYLQEIFSNEMAKVDDSFFHRLEESFLVEEDKKHERHPIFGNIVDEVAYHEKYPTIYHLRKKLVDSTDKADLRLIYLALAHMIKFRGHFLIEGDLNPDNSDVDKLFIQLVQTYNQLFEENPINASGVDAKAILSARLSKSRRLENLIAQLPGEKKNGLFGNLIALSLGLTPNFKSNFDLAEDAKLQLSKDTYDDDLDNLLAQIGDQYADLFLAAKNLSDAILLSDILRVNTEITKAPLSASMIKRYDEHHQDLTLLKALVRQQLPEKYKEIFFDQSKNGYAGYIDGGASQEEFYKFIKPILEKMDGTEELLVKLNREDLLRKQRTFDNGSIPHQIHLGELHAILRRQEDFYPFLKDNREKIEKILTFRIPYYVGPLARGNSRFAWMTRKSEETITPWNFEEVVDKGASAQSFIERMTNFDKNLPNEKVLPKHSLLYEYFTVYNELTKVKYVTEGMRKPAFLSGEQKKAIVDLLFKTNRKVTVKQLKEDYFKKIECFDSVEISGVEDRFNASLGTYHDLLKIIKDKDFLDNEENEDILEDIVLTLTLFEDREMIEERLKTYAHLFDDKVMKQLKRRRYTGWGRLSRKLINGIRDKQSGKTILDFLKSDGFANRNFMQLIHDDSLTFKEDIQKAQVSGQGDSLHEHIANLAGSPAIKKGILQTVKVVDELVKVMGRHKPENIVIEMARENQTTQKGQKNSRERMKRIEEGIKELGSQILKEHPVENTQLQNEKLYLYYLQNGRDMYVDQELDINRLSDYDVDHIVPQSFLKDDSIDNKVLTRSDKNRGKSDNVPSEEVVKKMKNYWRQLLNAKLITQRKFDNLTKAERGGLSELDKAGFIKRQLVETRQITKHVAQILDSRMNTKYDENDKLIREVKVITLKSKLVSDFRKDFQFYKVREINNYHHAHDAYLNAVVGTALIKKYPKLESEFVYGDYKVYDVRKMIAKSEQEIGKATAKYFFYSNIMNFFKTEITLANGEIRKRPLIETNGETGEIVWDKGRDFATVRKVLSMPQVNIVKKTEVQTGGFSKESILPKRNSDKLIARKKDWDPKKYGGFDSPTVAYSVLVVAKVEKGKSKKLKSVKELLGITIMERSSFEKNPIDFLEAKGYKEVKKDLIIKLPKYSLFELENGRKRMLASAGELQKGNELALPSKYVNFLYLASHYEKLKGSPGSSGSETPGTSESATPESSGSEVEFSHEYWMRHALTLAKRARDEREVPVGAVLVLNNRVIGEGWNRAIGLHDPTAHAEIMALRQGGLVMQNYRLIDATLYVTFEPCVMCAGAMIHSRIGRVVFGVRNAKTGAAGSLMDVLHYPGMNHRVEITEGILADECAALLCYFFRMPREDNEQKQLFVEQHKHYLDEIIEQISEFSKRVILADANLDKVLSAYNKHRDKPIREQAENIIHLFTLTNLGAPAAFKYFDTTIDRKRYTSTKEVLDATLIHQSITGLYETRIDLSQLGGD

SEQ ID NO: 134 - protein, 1543 aa, Artificial Sequence
  Description of Artificial Sequence: Synthetic polypeptide
MDKKYSIGLAIGTNSVGWAVITDEYKVPSKKFKVLGNTDRHSIKKNLIGALLFDSGETAEATRLKRTARRRYTRRKNRICYLQEIFSNEMAKVDDSFFHRLEESFLVEEDKKHERHPIFGNIVDEVAYHEKYPTIYHLRKKLVDSTDKADLRLIYLALAHMIKFRGHFLIEGDLNPDNSDVDKLFIQLVQTYNQLFEENPINASGVDAKAILSARLSKSRRLENLIAQLPGEKKNGLFGNLIALSLGLTPNFKSNFDLAEDAKLQLSKDTYDDDLDNLLAQIGDQYADLFLAAKNLSDAILLSDILRVNTEITKAPLSASMIKRYDEHHQDLTLLKALVRQQLPEKYKEIFFDQSKNGYAGYIDGGASQEEFYKFIKPILEKMDGTEELLVKLNREDLLRKQRTFDNGSIPHQIHLGELHAILRRQEDFYPFLKDNREKIEKILTFRIPYYVGPLARGNSRFAWMTRKSEETITPWNFEEVVDKGASAQSFIERMTNFDKNLPNEKVLPKHSLLYEYFTVYNELTKVKYVTEGMRKPAFLSGEQKKAIVDLLFKTNRKVTVKQLKEDYFKKIECFDSVEISGVEDRFNASLGTYHDLLKIIKDKDFLDNEENEDILEDIVLTLTLFEDREMIEERLKTYAHLFDDKVMKQLKRRRYTGWGRLSRKLINGIRDKQSGKTILDFLKSDGFANRNFMQLIHDDSLTFKEDIQKAQVSGQGDSLHEHIANLAGSPAIKKGILQTVKVVDELVKVMGRHKPENIVIEMARENQTTQKGQKNSRERMKRIEEGIKELGSQILKEHPVENTQLQNEKLYLYYLQNGRDMYVDQELDINRLSDYDVDHIVPQSFLKDDSIDNKVLTRSDKNRGKSDNVPSEEVVKKMKNYWRQLLNAKLITQRKFDNLTKAERGGLSELDKAGFIKRQLVETRQITKHVAQILDSRMNTKYDENDKLIREVKVITLKSKLVSDFRKDFQFYKVREINNYHHAHDAYLNAVVGTALIKKYPKLESEFVYGDYKVYDVRKMIAKSEQEIGKATAKYFFYSNIMNFFKTEITLANGEIRKRPLIETNGETGEIVWDKGRDFATVRKVLSMPQVNIVKKTEVQTGGFSKESILPKRNSDKLIARKKDWDPKKYGGFDSPTVAYSVLVVAKVEKGKSKKLKSVKELLGITIMERSSFEKNPIDFLEAKGYKEVKKDLIIKLPKYSLFELENGRKRMLASAGELQKGNELALPSKYVNFLYLASHYEKLKGSPGSSGSSGSETPGTSESATPESSGSEVEFSHEYWMRHALTLAKRARDEREVPVGAVLVLNNRVIGEGWNRAIGLHDPTAHAEIMALRQGGLVMQNYRLIDATLYVTFEPCVMCAGAMIHSRIGRVVFGVRNAKTGAAGSLMDVLHYPGMNHRVEITEGILADECAALLCYFFRMPREDNEQKQLFVEQHKHYLDEIIEQISEFSKRVILADANLDKVLSAYNKHRDKPIREQAENIIHLFTLTNLGAPAAFKYFDTTIDRKRYTSTKEVLDATLIHQSITGLYETRIDLSQLGGD

SEQ ID NO: 135 - protein, 1546 aa, Artificial Sequence
  Description of Artificial Sequence: Synthetic polypeptide
MDKKYSIGLAIGTNSVGWAVITDEYKVPSKKFKVLGNTDRHSIKKNLIGALLFDSGETAEATRLKRTARRRYTRRKNRICYLQEIFSNEMAKVDDSFFHRLEESFLVEEDKKHERHPIFGNIVDEVAYHEKYPTIYHLRKKLVDSTDKADLRLIYLALAHMIKFRGHFLIEGDLNPDNSDVDKLFIQLVQTYNQLFEENPINASGVDAKAILSARLSKSRRLENLIAQLPGEKKNGLFGNLIALSLGLTPNFKSNFDLAEDAKLQLSKDTYDDDLDNLLAQIGDQYADLFLAAKNLSDAILLSDILRVNTEITKAPLSASMIKRYDEHHQDLTLLKALVRQQLPEKYKEIFFDQSKNGYAGYIDGGASQEEFYKFIKPILEKMDGTEELLVKLNREDLLRKQRTFDNGSIPHQIHLGELHAILRRQEDFYPFLKDNREKIEKILTFRIPYYVGPLARGNSRFAWMTRKSEETITPWNFEEVVDKGASAQSFIERMTNFDKNLPNEKVLPKHSLLYEYFTVYNELTKVKYVTEGMRKPAFLSGEQKKAIVDLLFKTNRKVTVKQLKEDYFKKIECFDSVEISGVEDRFNASLGTYHDLLKIIKDKDFLDNEENEDILEDIVLTLTLFEDREMIEERLKTYAHLFDDKVMKQLKRRRYTGWGRLSRKLINGIRDKQSGKTILDFLKSDGFANRNFMQLIHDDSLTFKEDIQKAQVSGQGDSLHEHIANLAGSPAIKKGILQTVKVVDELVKVMGRHKPENIVIEMARENQTTQKGQKNSRERMKRIEEGIKELGSQILKEHPVENTQLQNEKLYLYYLQNGRDMYVDQELDINRLSDYDVDHIVPQSFLKDDSIDNKVLTRSDKNRGKSDNVPSEEVVKKMKNYWRQLLNAKLITQRKFDNLTKAERGGLSELDKAGFIKRQLVETRQITKHVAQILDSRMNTKYDENDKLIREVKVITLKSKLVSDFRKDFQFYKVREINNYHHAHDAYLNAVVGTALIKKYPKLESEFVYGDYKVYDVRKMIAKSEQEIGKATAKYFFYSNIMNFFKTEITLANGEIRKRPLIETNGETGEIVWDKGRDFATVRKVLSMPQVNIVKKTEVQTGGFSKESILPKRNSDKLIARKKDWDPKKYGGFDSPTVAYSVLVVAKVEKGKSKKLKSVKELLGITIMERSSFEKNPIDFLEAKGYKEVKKDLIIKLPKYSLFELENGRKRMLASAGELQKGNELALPSKYVNFLYLASHYEKLKGSPGSSGSSGSETPGTSESATPESGSSSGSEVEFSHEYWMRHALTLAKRARDEREVPVGAVLVLNNRVIGEGWNRAIGLHDPTAHAEIMALRQGGLVMQNYRLIDATLYVTFEPCVMCAGAMIHSRIGRVVFGVRNAKTGAAGSLMDVLHYPGMNHRVEITEGILADECAALLCYFFRMPREDNEQKQLFVEQHKHYLDEIIEQISEFSKRVILADANLDKVLSAYNKHRDKPIREQAENIIHLFTLTNLGAPAAFKYFDTTIDRKRYTSTKEVLDATLIHQSITGLYETRIDLSQLGGD

SEQ ID NO: 136 - protein, 1546 aa, Artificial Sequence
  Description of Artificial Sequence: Synthetic polypeptide
MDKKYSIGLAIGTNSVGWAVITDEYKVPSKKFKVLGNTDRHSIKKNLIGALLFDSGETAEATRLKRTARRRYTRRKNRICYLQEIFSNEMAKVDDSFFHRLEESFLVEEDKKHERHPIFGNIVDEVAYHEKYPTIYHLRKKLVDSTDKADLRLIYLALAHMIKFRGHFLIEGDLNPDNSDVDKLFIQLVQTYNQLFEENPINASGVDAKAILSARLSKSRRLENLIAQLPGEKKNGLFGNLIALSLGLTPNFKSNFDLAEDAKLQLSKDTYDDDLDNLLAQIGDQYADLFLAAKNLSDAILLSDILRVNTEITKAPLSASMIKRYDEHHQDLTLLKALVRQQLPEKYKEIFFDQSKNGYAGYIDGGASQEEFYKFIKPILEKMDGTEELLVKLNREDLLRKQRTFDNGSIPHQIHLGELHAILRRQEDFYPFLKDNREKIEKILTFRIPYYVGPLARGNSRFAWMTRKSEETITPWNFEEVVDKGASAQSFIERMTNFDKNLPNEKVLPKHSLLYEYFTVYNELTKVKYVTEGMRKPAFLSGEQKKAIVDLLFKTNRKVTVKQLKEDYFKKIECFDSVEISGVEDRFNASLGTYHDLLKIIKDKDFLDNEENEDILEDIVLTLTLFEDREMIEERLKTYAHLFDDKVMKQLKRRRYTGWGRLSRKLINGIRDKQSGKTILDFLKSDGFANRNFMQLIHDDSLTFKEDIQKAQVSGQGDSLHEHIANLAGSPAIKKGILQTVKVVDELVKVMGRHKPENIVIEMARENQTTQKGQKNSRERMKRIEEGIKELGSQILKEHPVENTQLQNEKLYLYYLQNGRDMYVDQELDINRLSDYDVDHIVPQSFLKDDSIDNKVLTRSDKNRGKSDNVPSEEVVKKMKNYWRQLLNAKLITQRKFDNLTKAERGGLSELDKAGFIKRQLVETRQITKHVAQILDSRMNTKYDENDKLIREVKVITLKSKLVSDFRKDFQFYKVREINNYHHAHDAYLNAVVGTALIKKYPKLESEFVYGDYKVYDVRKMIAKSEQEIGKATAKYFFYSNIMNFFKTEITLANGEIRKRPLIETNGETGEIVWDKGRDFATVRKVLSMPQVNIVKKTEVQTGGFSKESILPKRNSDKLIARKKDWDPKKYGGFDSPTVAYSVLVVAKVEKGKSKKLKSVKELLGITIMERSSFEKNPIDFLEAKGYKEVKKDLIIKLPKYSLFELENGRKRMLASAGELQKGNELALPSKYVNFLYLASHYEKLKGSPGSSGSSGSETPGTSESATPESGSSSGSEVEFSHEYWMRHALTLAKRARDEREVPVGAVLVLNNRVIGEGWNRAIGLHDPTAHAEIMALRQGGLVMQNYRLIDATLYVTFEPCVMCAGAMIHSRIGRVVFGVRNAKTGAAGSLMDVLHYPGMNHRVEITEGILADECAALLCYFFRMRREDNEQKQLFVEQHKHYLDEIIEQISEFSKRVILADANLDKVLSAYNKHRDKPIREQAENIIHLFTLTNLGAPAAFKYFDTTIDRKRYTSTKEVLDATLIHQSITGLYETRIDLSQLGGD

SEQ ID NO: 137 - protein, 1546 aa, Artificial Sequence
  Description of Artificial Sequence: Synthetic polypeptide
MDKKYSIGLAIGTNSVGWAVITDEYKVPSKKFKVLGNTDRHSIKKNLIGALLFDSGETAEATRLKRTARRRYTRRKNRICYLQEIFSNEMAKVDDSFFHRLEESFLVEEDKKHERHPIFGNIVDEVAYHEKYPTIYHLRKKLVDSTDKADLRLIYLALAHMIKFRGHFLIEGDLNPDNSDVDKLFIQLVQTYNQLFEENPINASGVDAKAILSARLSKSRRLENLIAQLPGEKKNGLFGNLIALSLGLTPNFKSNFDLAEDAKLQLSKDTYDDDLDNLLAQIGDQYADLFLAAKNLSDAILLSDILRVNTEITKAPLSASMIKRYDEHHQDLTLLKALVRQQLPEKYKEIFFDQSKNGYAGYIDGGASQEEFYKFIKPILEKMDGTEELLVKLNREDLLRKQRTFDNGSIPHQIHLGELHAILRRQEDFYPFLKDNREKIEKILTFRIPYYVGPLARGNSRFAWMTRKSEETITPWNFEEVVDKGASAQSFIERMTNFDKNLPNEKVLPKHSLLYEYFTVYNELTKVKYVTEGMRKPAFLSGEQKKAIVDLLFKTNRKVTVKQLKEDYFKKIECFDSVEISGVEDRFNASLGTYHDLLKIIKDKDFLDNEENEDILEDIVLTLTLFEDREMIEERLKTYAHLFDDKVMKQLKRRRYTGWGRLSRKLINGIRDKQSGKTILDFLKSDGFANRNFMQLIHDDSLTFKEDIQKAQVSGQGDSLHEHIANLAGSPAIKKGILQTVKVVDELVKVMGRHKPENIVIEMARENQTTQKGQKNSRERMKRIEEGIKELGSQILKEHPVENTQLQNEKLYLYYLQNGRDMYVDQELDINRLSDYDVDHIVPQSFLKDDSIDNKVLTRSDKNRGKSDNVPSEEVVKKMKNYWRQLLNAKLITQRKFDNLTKAERGGLSELDKAGFIKRQLVETRQITKHVAQILDSRMNTKYDENDKLIREVKVITLKSKLVSDFRKDFQFYKVREINNYHHAHDAYLNAVVGTALIKKYPKLESEFVYGDYKVYDVRKMIAKSEQEIGKATAKYFFYSNIMNFFKTEITLANGEIRKRPLIETNGETGEIVWDKGRDFATVRKVLSMPQVNIVKKTEVQTGGFSKESILPKRNSDKLIARKKDWDPKKYGGFDSPTVAYSVLVVAKVEKGKSKKLKSVKELLGITIMERSSFEKNPIDFLEAKGYKEVKKDLIIKLPKYSLFELENGRKRMLASAGELQKGNELALPSKYVNFLYLASHYEKLKGSGSSGSSGSETPGTSESATPESGSSSGSEVEFSHEYWMRHALTLAKRARDEREVPVGAVLVLNNRVIGEGWNRAIGLHDPTAHAEIMALRQGGLVMQNYRLIDATLYVTFEPCVMCAGAMIHSRIGRVVFGVRNAKTGAAGSLMDVLHYPGMNHRVEITEGILADECAALLCYFFRMRRPEDNEQKQLFVEQHKHYLDEIIEQISEFSKRVILADANLDKVLSAYNKHRDKPIREQAENIIHLFTLTNLGAPAAFKYFDTTIDRKRYTSTKEVLDATLIHQSITGLYETRIDLSQLGGD

SEQ ID NO: 138 - protein, 1551 aa, Artificial Sequence
  Description of Artificial Sequence: Synthetic polypeptide
MDKKYSIGLAIGTNSVGWAVITDEYKVPSKKFKVLGNTDRHSIKKNLIGALLFDSGETAEATRLKRTARRRYTRRKNRICYLQEIFSNEMAKVDDSFFHRLEESFLVEEDKKHERHPIFGNIVDEVAYHEKYPTIYHLRKKLVDSTDKADLRLIYLALAHMIKFRGHFLIEGDLNPDNSDVDKLFIQLVQTYNQLFEENPINASGVDAKAILSARLSKSRRLENLIAQLPGEKKNGLFGNLIALSLGLTPNFKSNFDLAEDAKLQLSKDTYDDDLDNLLAQIGDQYADLFLAAKNLSDAILLSDILRVNTEITKAPLSASMIKRYDEHHQDLTLLKALVRQQLPEKYKEIFFDQSKNGYAGYIDGGASQEEFYKFIKPILEKMDGTEELLVKLNREDLLRKQRTFDNGSIPHQIHLGELHAILRRQEDFYPFLKDNREKIEKILTFRIPYYVGPLARGNSRFAWMTRKSEETITPWNFEEVVDKGASAQSFIERMTNFDKNLPNEKVLPKHSLLYEYFTVYNELTKVKYVTEGMRKPAFLSGEQKKAIVDLLFKTNRKVTVKQLKEDYFKKIECFDSVEISGVEDRFNASLGTYHDLLKIIKDKDFLDNEENEDILEDIVLTLTLFEDREMIEERLKTYAHLFDDKVMKQLKRRRYTGWGRLSRKLINGIRDKQSGKTILDFLKSDGFANRNFMQLIHDDSLTFKEDIQKAQVSGQGDSLHEHIANLAGSPAIKKGILQTVKVVDELVKVMGRHKPENIVIEMARENQTTQKGQKNSRERMKRIEEGIKELGSQILKEHPVENTQLQNEKLYLYYLQNGRDMYVDQELDINRLSDYDVDHIVPQSFLKDDSIDNKVLTRSDKNRGKSDNVPSEEVVKKMKNYWRQLLNAKLITQRKFDNLTKAERGGLSELDKAGFIKRQLVETRQITKHVAQILDSRMNTKYDENDKLIREVKVITLKSKLVSDFRKDFQFYKVREINNYHHAHDAYLNAVVGTALIKKYPKLESEFVYGDYKVYDVRKMIAKSEQEIGKATAKYFFYSNIMNFFKTEITLANGEIRKRPLIETNGETGEIVWDKGRDFATVRKVLSMPQVNIVKKTEVQTGGFSKESILPKRNSDKLIARKKDWDPKKYGGFDSPTVAYSVLVVAKVEKGKSKKLKSVKELLGITIMERSSFEKNPIDFLEAKGYKEVKKDLIIKLPKYSLFELENGRKRMLASAGELQKGNELALPSKYVNFLYLASHYEKLKGSPGSSGSSGSETPGTSESATPESGSSGSEVEFSHEYWMRHALTLAKRARDEREVPVGAVLVLNNRVIGEGWNRAHAEIMALRQGGLVMQNYRLIDATLYVTFEPCVMCAGAMIHSRIGRVVFGVRNAKTGAAGSLMDVLHYPGMNHRVEITEGILADECAALLCYFFRMPRQVFNAQKKAQSSTDEDNEQKQLFVEQHKHYLDEIIEQISEFSKRVILADANLDKVLSAYNKHRDKPIREQAENIIHLFTLTNLGAPAAFKYFDTTIDRKRYTSTKEVLDATLIHQSITGLYETRIDLSQLGGD

SEQ ID NO: 139 - protein, 1546 aa, Artificial Sequence
  Description of Artificial Sequence: Synthetic polypeptide
MDKKYSIGLAIGTNSVGWAVITDEYKVPSKKFKVLGNTDRHSIKKNLIGALLFDSGETAEATRLKRTARRRYTRRKNRICYLQEIFSNEMAKVDDSFFHRLEESFLVEEDKKHERHPIFGNIVDEVAYHEKYPTIYHLRKKLVDSTDKADLRLIYLALAHMIKFRGHFLIEGDLNPDNSDVDKLFIQLVQTYNQLFEENPINASGVDAKAILSARLSKSRRLENLIAQLPGEKKNGLFGNLIALSLGLTPNFKSNFDLAEDAKLQLSKDTYDDDLDNLLAQIGDQYADLFLAAKNLSDAILLSDILRVNTEITKAPLSASMIKRYDEHHQDLTLLKALVRQQLPEKYKEIFFDQSKNGYAGYIDGGASQEEFYKFIKPILEKMDGTEELLVKLNREDLLRKQRTFDNGSIPHQIHLGELHAILRRQEDFYPFLKDNREKIEKILTFRIPYYVGPLARGNSRFAWMTRKSEETITPWNFEEVVDKGASAQSFIERMTNFDKNLPNEKVLPKHSLLYEYFTVYNELTKVKYVTEGMRKPAFLSGEQKKAIVDLLFKTNRKVTVKQLKEDYFKKIECFDSVEISGVEDRFNASLGTYHDLLKIIKDKDFLDNEENEDILEDIVLTLTLFEDREMIEERLKTYAHLFDDKVMKQLKRRRYTGWGRLSRKLINGIRDKQSGKTILDFLKSDGFANRNFMQLIHDDSLTFKEDIQKAQVSGQGDSLHEHIANLAGSPAIKKGILQTVKVVDELVKVMGRHKPENIVIEMARENQTTQKGQKNSRERMKRIEEGIKELGSQILKEHPVENTQLQNEKLYLYYLQNGRDMYVDQELDINRLSDYDVDHIVPQSFLKDDSIDNKVLTRSDKNRGKSDNVPSEEVVKKMKNYWRQLLNAKLITQRKFDNLTKAERGGLSELDKAGFIKRQLVETRQITKHVAQILDSRMNTKYDENDKLIREVKVITLKSKLVSDFRKDFQFYKVREINNYHHAHDAYLNAVVGTALIKKYPKLESEFVYGDYKVYDVRKMIAKSEQEIGKATAKYFFYSNIMNFFKTEITLANGEIRKRPLIETNGETGEIVWDKGRDFATVRKVLSMPQVNIVKKTEVQTGGFSKESILPKRNSDKLIARKKDWDPKKYGGFDSPTVAYSVLVVAKVEKGKSKKLKSVKELLGITIMERSSFEKNPIDFLEAKGYKEVKKDLIIKLPKYSLFELENGRKRMLASAGELQKGNELALPSKYVNFLYLASHYEKLKGSPEGSSGSSGSETPGTSESATPESGSSSGSEVEFSHEYWMRHALTLAKRARDEREVPVGAVLVLNNRVIGEGWNRAIGLHDPTAHAEIMALRQGGLVMQNYRLIDATLYVTFEPCVMCAGAMIHSRIGRVVFGVRNAKTGAAGSLMDVLHYPGMNHRVEITEGILADECAALLCYFFRMRRDNEQKQLFVEQHKHYLDEIIEQISEFSKRVILADANLDKVLSAYNKHRDKPIREQAENIIHLFTLTNLGAPAAFKYFDTTIDRKRYTSTKEVLDATLIHQSITGLYETRIDLSQLGGD

SEQ ID NO: 140 - protein, 1546 aa, Artificial Sequence
  Description of Artificial Sequence: Synthetic polypeptide
MDKKYSIGLAIGTNSVGWAVITDEYKVPSKKFKVLGNTDRHSIKKNLIGALLFDSGETAEATRLKRTARRRYTRRKNRICYLQEIFSNEMAKVDDSFFHRLEESFLVEEDKKHERHPIFGNIVDEVAYHEKYPTIYHLRKKLVDSTDKADLRLIYLALAHMIKFRGHFLIEGDLNPDNSDVDKLFIQLVQTYNQLFEENPINASGVDAKAILSARLSKSRRLENLIAQLPGEKKNGLFGNLIALSLGLTPNFKSNFDLAEDAKLQLSKDTYDDDLDNLLAQIGDQYADLFLAAKNLSDAILLSDILRVNTEITKAPLSASMIKRYDEHHQDLTLLKALVRQQLPEKYKEIFFDQSKNGYAGYIDGGASQEEFYKFIKPILEKMDGTEELLVKLNREDLLRKQRTFDNGSIPHQIHLGELHAILRRQEDFYPFLKDNREKIEKILTFRIPYYVGPLARGNSRFAWMTRKSEETITPWNFEEVVDKGASAQSFIERMTNFDKNLPNEKVLPKHSLLYEYFTVYNELTKVKYVTEGMRKPAFLSGEQKKAIVDLLFKTNRKVTVKQLKEDYFKKIECFDSVEISGVEDRFNASLGTYHDLLKIIKDKDFLDNEENEDILEDIVLTLTLFEDREMIEERLKTYAHLFDDKVMKQLKRRRYTGWGRLSRKLINGIRDKQSGKTILDFLKSDGFANRNFMQLIHDDSLTFKEDIQKAQVSGQGDSLHEHIANLAGSPAIKKGILQTVKVVDELVKVMGRHKPENIVIEMARENQTTQKGQKNSRERMKRIEEGIKELGSQILKEHPVENTQLQNEKLYLYYLQNGRDMYVDQELDINRLSDYDVDHIVPQSFLKDDSIDNKVLTRSDKNRGKSDNVPSEEVVKKMKNYWRQLLNAKLITQRKFDNLTKAERGGLSELDKAGFIKRQLVETRQITKHVAQILDSRMNTKYDENDKLIREVKVITLKSKLVSDFRKDFQFYKVREINNYHHAHDAYLNAVVGTALIKKYPKLESEFVYGDYKVYDVRKMIAKSEQEIGKATAKYFFYSNIMNFFKTEITLANGEIRKRPLIETNGETGEIVWDKGRDFATVRKVLSMPQVNIVKKTEVQTGGFSKESILPKRNSDKLIARKKDWDPKKYGGFDSPTVAYSVLVVAKVEKGKSKKLKSVKELLGITIMERSSFEKNPIDFLEAKGYKEVKKDLIIKLPKYSLFELENGRKRMLASAGELQKGNELALPSKYVNFLYLASHYEKLKGSPEDGSSGSSGSETPGTSESATPESGSSSGSEVEFSHEYWMRHALTLAKRARDEREVPVGAVLVLNNRVIGEGWNRAIGLHDPTAHAEIMALRQGGLVMQNYRLIDATLYVTFEPCVMCAGAMIHSRIGRVVFGVRNAKTGAAGSLMDVLHYPGMNHRVEITEGILADECAALLCYFFRMRRNEQKQLFVEQHKHYLDEIIEQISEFSKRVILADANLDKVLSAYNKHRDKPIREQAENIIHLFTLTNLGAPAAFKYFDTTIDRKRYTSTKEVLDATLIHQSITGLYETRIDLSQLGGD

SEQ ID NO: 141 - protein, 1533 aa, Artificial Sequence
  Description of Artificial Sequence: Synthetic polypeptide
MDKKYSIGLAIGTNSVGWAVITDEYKVPSKKFKVLGNTDRHSIKKNLIGALLFDSGETAEATRLKRTARRRYTRRKNRICYLQEIFSNEMAKVDDSFFHRLEESFLVEEDKKHERHPIFGNIVDEVAYHEKYPTIYHLRKKLVDSTDKADLRLIYLALAHMIKFRGHFLIEGDLNPDNSDVDKLFIQLVQTYNQLFEENPINASGVDAKAILSARLSKSRRLENLIAQLPGEKKNGLFGNLIALSLGLTPNFKSNFDLAEDAKLQLSKDTYDDDLDNLLAQIGDQYADLFLAAKNLSDAILLSDILRVNTEITKAPLSASMIKRYDEHHQDLTLLKALVRQQLPEKYKEIFFDQSKNGYAGYIDGGASQEEFYKFIKPILEKMDGTEELLVKLNREDLLRKQRTFDNGSIPHQIHLGELHAILRRQEDFYPFLKDNREKIEKILTFRIPYYVGPLARGNSRFAWMTRKSEETITPWNFEEVVDKGASAQSFIERMTNFDKNLPNEKVLPKHSLLYEYFTVYNELTKVKYVTEGMRKPAFLSGEQKKAIVDLLFKTNRKVTVKQLKEDYFKKIECFDSVEISGVEDRFNASLGTYHDLLKIIKDKDFLDNEENEDILEDIVLTLTLFEDREMIEERLKTYAHLFDDKVMKQLKRRRYTGWGRLSRKLINGIRDKQSGKTILDFLKSDGFANRNFMQLIHDDSLTFKEDIQKAQVSGQGDSLHEHIANLAGSPAIKKGILQTVKVVDELVKVMGRHKPENIVIEMARENQTTQKGQKNSRERMKRIEEGIKELGSQILKEHPVENTQLQNEKLYLYYLQNGRDMYVDQELDINRLSDYDVDHIVPQSFLKDDSIDNKVLTRSDKNRGKSDNVPSEEVVKKMKNYWRQLLNAKLITQRKFDNLTKAERGGLSELDKAGFIKRQLVETRQITKHVAQILDSRMNTKYDENDKLIREVKVITLKSKLVSDFRKDFQFYKVREINNYHHAHDAYLNAVVGTALIKKYPKLESEFVYGDYKVYDVRKMIAKSEQEIGKATAKYFFYSNIMNFFKTEITLANGEIRKRPLIETNGETGEIVWDKGRDFATVRKVLSMPQVNIVKKTEVQTGGFSKESILPKRNSDKLIARKKDWDPKKYGGFDSPTVAYSVLVVAKVEKGKSKKLKSVKELLGITIMERSSFEKNPIDFLEAKGYKEVKKDLIIKLPKYSLFELENGRKRMLASAGELQKGNELALPSKYVNFLYLASHYEKLKGSPGSSGSETPGTSESATPESSGSEVEFSHEYWMRHALTLAKRARDEREVPVGAVLVLNNRVIGEGWNRAHAEIMALRQGGLVMQNYRLIDATLYVTFEPCVMCAGAMIHSRIGRVVFGVRNAKTGAAGSLMDVLHYPGMNHRVEITEGILADECAALLCYFFRMPRQEDNEQKQLFVEQHKHYLDEIIEQISEFSKRVILADANLDKVLSAYNKHRDKPIREQAENIIHLFTLTNLGAPAAFKYFDTTIDRKRYTSTKEVLDATLIHQSITGLYETRIDLSQLGGD

SEQ ID NO: 142 - protein, 1549 aa, Artificial Sequence
  Description of Artificial Sequence: Synthetic polypeptide
MDKKYSIGLAIGTNSVGWAVITDEYKVPSKKFKVLGNTDRHSIKKNLIGALLFDSGETAEATRLKRTARRRYTRRKNRICYLQEIFSNEMAKVDDSFFHRLEESFLVEEDKKHERHPIFGNIVDEVAYHEKYPTIYHLRKKLVDSTDKADLRLIYLALAHMIKFRGHFLIEGDLNPDNSDVDKLFIQLVQTYNQLFEENPINASGVDAKAILSARLSKSRRLENLIAQLPGEKKNGLFGNLIALSLGLTPNFKSNFDLAEDAKLQLSKDTYDDDLDNLLAQIGDQYADLFLAAKNLSDAILLSDILRVNTEITKAPLSASMIKRYDEHHQDLTLLKALVRQQLPEKYKEIFFDQSKNGYAGYIDGGASQEEFYKFIKPILEKMDGTEELLVKLNREDLLRKQRTFDNGSIPHQIHLGELHAILRRQEDFYPFLKDNREKIEKILTFRIPYYVGPLARGNSRFAWMTRKSEETITPWNFEEVVDKGASAQSFIERMTNFDKNLPNEKVLPKHSLLYEYFTVYNELTKVKYVTEGMRKPAFLSGEQKKAIVDLLFKTNRKVTVKQLKEDYFKKIECFDSVEISGVEDRFNASLGTYHDLLKIIKDKDFLDNEENEDILEDIVLTLTLFEDREMIEERLKTYAHLFDDKVMKQLKRRRYTGWGRLSRKLINGIRDKQSGKTILDFLKSDGFANRNFMQLIHDDSLTFKEDIQKAQVSGQGDSLHEHIANLAGSPAIKKGILQTVKVVDELVKVMGRHKPENIVIEMARENQTTQKGQKNSRERMKRIEEGIKELGSQILKEHPVENTQLQNEKLYLYYLQNGRDMYVDQELDINRLSDYDVDHIVPQSFLKDDSIDNKVLTRSDKNRGKSDNVPSEEVVKKMKNYWRQLLNAKLITQRKFDNLTKAERGGLSELDKAGFIKRQLVETRQITKHVAQILDSRMNTKYDENDKLIREVKVITLKSKLVSDFRKDFQFYKVREINNYHHAHDAYLNAVVGTALSHEYWMRHALTLAKRARDEREVPVGAVLVLNNRVIGEGWNRAIGLHDPTAHAEIMALRQGGLVMQNYRLIDATLYVTFEPCVMCAGAMIHSRIGRVVFGVRNAKTGAAGSLMDVLHYPGMNHRVEITEGILADECAALLCYFFRMPRQVFNAQKKAQSSTDGSSGSETPGTSESATPESSGIKKYPKLESEFVYGDYKVYDVRKMIAKSEQEIGKATAKYFFYSNIMNFFKTEITLANGEIRKRPLIETNGETGEIVWDKGRDFATVRKVLSMPQVNIVKKTEVQTGGFSKESILPKRNSDKLIARKKDWDPKKYGGFDSPTVAYSVLVVAKVEKGKSKKLKSVKELLGITIMERSSFEKNPIDFLEAKGYKEVKKDLIIKLPKYSLFELENGRKRMLASAGELQKGNELALPSKYVNFLYLASHYEKLKGSPEDNEQKQLFVEQHKHYLDEIIEQISEFSKRVILADANLDKVLSAYNKHRDKPIREQAENIIHLFTLTNLGAPAAFKYFDTTIDRKRYTSTKEVLDATLIHQSITGLYETRIDLSQLGGD

SEQ ID NO: 143 - protein, 1555 aa, Artificial Sequence
  Description of Artificial Sequence: Synthetic polypeptide
MDKKYSIGLAIGTNSVGWAVITDEYKVPSKKFKVLGNTDRHSIKKNLIGALLFDSGETAEATRLKRTARRRYTRRKNRICYLQEIFSNEMAKVDDSFFHRLEESFLVEEDKKHERHPIFGNIVDEVAYHEKYPTIYHLRKKLVDSTDKADLRLIYLALAHMIKFRGHFLIEGDLNPDNSDVDKLFIQLVQTYNQLFEENPINASGVDAKAILSARLSKSRRLENLIAQLPGEKKNGLFGNLIALSLGLTPNFKSNFDLAEDAKLQLSKDTYDDDLDNLLAQIGDQYADLFLAAKNLSDAILLSDILRVNTEITKAPLSASMIKRYDEHHQDLTLLKALVRQQLPEKYKEIFFDQSKNGYAGYIDGGASQEEFYKFIKPILEKMDGTEELLVKLNREDLLRKQRTFDNGSIPHQIHLGELHAILRRQEDFYPFLKDNREKIEKILTFRIPYYVGPLARGNSRFAWMTRKSEETITPWNFEEVVDKGASAQSFIERMTNFDKNLPNEKVLPKHSLLYEYFTVYNELTKVKYVTEGMRKPAFLSGEQKKAIVDLLFKTNRKVTVKQLKEDYFKKIECFDSVEISGVEDRFNASLGTYHDLLKIIKDKDFLDNEENEDILEDIVLTLTLFEDREMIEERLKTYAHLFDDKVMKQLKRRRYTGWGRLSRKLINGIRDKQSGKTILDFLKSDGFANRNFMQLIHDDSLTFKEDIQKAQVSGQGDSLHEHIANLAGSPAIKKGILQTVKVVDELVKVMGRHKPENIVIEMARENQTTQKGQKNSRERMKRIEEGIKELGSQILKEHPVENTQLQNEKLYLYYLQNGRDMYVDQELDINRLSDYDVDHIVPQSFLKDDSIDNKVLTRSDKNRGKSDNVPSEEVVKKMKNYWRQLLNAKLITQRKFDNLTKAERGGLSELDKAGFIKRQLVETRQITKHVAQILDSRMNTKYDENDKLIREVKVITLKSKLVSDFRKDFQFYKVREINNYHHAHDAYLNAVVGTALSHEYWMRHALTLAKRARDEREVPVGAVLVLNNRVIGEGWNRAIGLHDPTAHAEIMALRQGGLVMQNYRLIDATLYVTFEPCVMCAGAMIHSRIGRVVFGVRNAKTGAAGSLMDVLHYPGMNHRVEITEGILADECAALLCYFFRMPRQVFNAQKKAQSSTDGSSGSSGSETPGTSESATPESSGGSSIKKYPKLESEFVYGDYKVYDVRKMIAKSEQEIGKATAKYFFYSNIMNFFKTEITLANGEIRKRPLIETNGETGEIVWDKGRDFATVRKVLSMPQVNIVKKTEVQTGGFSKESILPKRNSDKLIARKKDWDPKKYGGFDSPTVAYSVLVVAKVEKGKSKKLKSVKELLGITIMERSSFEKNPIDFLEAKGYKEVKKDLIIKLPKYSLFELENGRKRMLASAGELQKGNELALPSKYVNFLYLASHYEKLKGSPEDNEQKQLFVEQHKHYLDEIIEQISEFSKRVILADANLDKVLSAYNKHRDKPIREQAENIIHLFTLTNLGAPAAFKYFDTTIDRKRYTSTKEVLDATLIHQSITGLYETRIDLSQLGGD

SEQ ID NO: 144 - protein, 1421 aa, Artificial Sequence
  Description of Artificial Sequence: Synthetic polypeptide
MDKKYSIGLAIGTNSVGWAVITDEYKVPSKKFKVLGNTDRHSIKKNLIGALLFDSGETAEATRLKRTARRRYTRRKNRICYLQEIFSNEMAKVDDSFFHRLEESFLVEEDKKHERHPIFGNIVDEVAYHEKYPTIYHLRKKLVDSTDKADLRLIYLALAHMIKFRGHFLIEGDLNPDNSDVDKLFIQLVQTYNQLFEENPINASGVDAKAILSARLSKSRRLENLIAQLPGEKKNGLFGNLIALSLGLTPNFKSNFDLAEDAKLQLSKDTYDDDLDNLLAQIGDQYADLFLAAKNLSDAILLSDILRVNTEITKAPLSASMIKRYDEHHQDLTLLKALVRQQLPEKYKEIFFDQSKNGYAGYIDGGASQEEFYKFIKPILEKMDGTEELLVKLNREDLLRKQRTFDNGSIPHQIHLGELHAILRRQEDFYPFLKDNREKIEKILTFRIPYYVGPLARGNSRFAWMTRKSEETITPWNFEEVVDKGASAQSFIERMTNFDKNLPNEKVLPKHSLLYEYFTVYNELTKVKYVTEGMRKPAFLSGEQKKAIVDLLFKTNRKVTVKQLKEDYFKKIECFDSVEISGVEDRFNASLGTYHDLLKIIKDKDFLDNEENEDILEDIVLTLTLFEDREMIEERLKTYAHLFDDKVMKQLKRRRYTGWGRLSRKLINGIRDKQSGKTILDFLKSDGFANRNFMQLIHDDSLTFKEDIQKAQVSGQGDSLHEHIANLAGSPAIKKGILQTVKVVDELVKVMGRHKPENIVIEMARENQTTQKGQKNSRERMKRIEEGIKELGSEVEFSHEYWMRHALTLAKRARDEREVPVGAVLVLNNRVIGEGWNRAIGLHDPTAHAEIMALRQGGLVMQNYRLIDATLYVTFEPCVMCAGAMIHSRIGRVVFGVRNAKTGAAGSLMDVLHYPGMNHRVEITEGILADECAALLCYFFRMPRQVFNAQKKAQSSTDGGLSELDKAGFIKRQLVETRQITKHVAQILDSRMNTKYDENDKLIREVKVITLKSKLVSDFRKDFQFYKVREINNYHHAHDAYLNAVVGTALIKKYPKLESEFVYGDYKVYDVRKMIAKSEQEIGKATAKYFFYSNIMNFFKTEITLANGEIRKRPLIETNGETGEIVWDKGRDFATVRKVLSMPQVNIVKKTEVQTGGFSKESILPKRNSDKLIARKKDWDPKKYGGFDSPTVAYSVLVVAKVEKGKSKKLKSVKELLGITIMERSSFEKNPIDFLEAKGYKEVKKDLIIKLPKYSLFELENGRKRMLASAGELQKGNELALPSKYVNFLYLASHYEKLKGSPEDNEQKQLFVEQHKHYLDEIIEQISEFSKRVILADANLDKVLSAYNKHRDKPIREQAENIIHLFTLTNLGAPAAFKYFDTTIDRKRYTSTKEVLDATLIHQSITGLYETRIDLSQLGGD

SEQ ID NO: 145 - protein, 1552 aa, Artificial Sequence
  Description of Artificial Sequence: Synthetic polypeptide
MSEVEFSHEYWMRHALTLAKRARDEREVPVGAVLVLNNRVIGEGWNRAIGLHDPTAHAEIMALRQGGLVMQNYRLIDATLYVTFEPCVMCAGAMIHSRIGRVVFGVRNAKTGAAGSLMDVLHYPGMNHRVEITEGILADECAALLCYFFRMPRSGGSSGGSSGSETPGTSESATPESSGGSSGGSDKKYSIGLAIGTNSVGWAVITDEYKVPSKKFKVLGNTDRHSIKKNLIGALLFDSGETAEATRLKRTARRRYTRRKNRICYLQEIFSNEMAKVDDSFFHRLEESFLVEEDKKHERHPIFGNIVDEVAYHEKYPTIYHLRKKLVDSTDKADLRLIYLALAHMIKFRGHFLIEGDLNPDNSDVDKLFIQLVQTYNQLFEENPINASGVDAKAILSARLSKSRRLENLIAQLPGEKKNGLFGNLIALSLGLTPNFKSNFDLAEDAKLQLSKDTYDDDLDNLLAQIGDQYADLFLAAKNLSDAILLSDILRVNTEITKAPLSASMIKRYDEHHQDLTLLKALVRQQLPEKYKEIFFDQSKNGYAGYIDGGASQEEFYKFIKPILEKMDGTEELLVKLNREDLLRKQRTFDNGSIPHQIHLGELHAILRRQEDFYPFLKDNREKIEKILTFRIPYYVGPLARGNSRFAWMTRKSEETITPWNFEEVVDKGASAQSFIERMTNFDKNLPNEKVLPKHSLLYEYFTVYNELTKVKYVTEGMRKPAFLSGEQKKAIVDLLFKTNRKVTVKQLKEDYFKKIECFDSVEISGVEDRFNASLGTYHDLLKIIKDKDFLDNEENEDILEDIVLTLTLFEDREMIEERLKTYAHLFDDKVMKQLKRRRYTGWGRLSRKLINGIRDKQSGKTILDFLKSDGFANRNFMQLIHDDSLTFKEDIQKAQVSGQGDSLHEHIANLAGSPAIKKGILQTVKVVDELVKVMGRHKPENIVIEMARENQTTQKGQKNSRERMKRIEEGIKELGSQILKEHPVENTQLQNEKLYLYYLQNGRDMYVDQELDINRLSDYDVDHIVPQSFLKDDSIDNKVLTRSDKNRGKSDNVPSEEVVKKMKNYWRQLLNAKLITQRKFDNLTKAERGGLSELDKAGFIKRQLVETRQITKHVAQILDSRMNTKYDENDKLIREVKVITLKSKLVSDFRKDFQFYKVREINNYHHAHDAYLNAVVGTALIKKYPKLESEFVYGDYKVYDVRKMIAKSEQEIGKATAKYFFYSNIMNFFKTEITLANGEIRKRPLIETNGETGEIVWDKGRDFATVRKVLSMPQVNIVKKTEVQTGGFSKESILPKRNSDKLIARKKDWDPKKYGGFDSPTVAYSVLVVAKVEKGKSKKLKSVKELLGITIMERSSFEKNPIDFLEAKGYKEVKKDLIIKLPKYSLFELENGRKRMLASAGELQKGNELALPSKYVNFLYLASHYEKLKGSPEDNEQKQLFVEQHKHYLDEIIEQISEFSKRVILADANLDKVLSAYNKHRDKPIREQAENIIHLFTLTNLGAPAAFKYFDTTIDRKRYTSTKEVLDATLIHQSITGLYETRIDLSQLGGD

SEQ ID NO: 146 - protein, 1545 aa, Artificial Sequence
  Description of Artificial Sequence: Synthetic polypeptide
MSEVEFSHEYWMRHALTLAKRARDEREVPVGAVLVLNNRVIGEGWNRTAHAEIMALRQGGLVMQNYRLIDATLYVTFEPCVMCAGAMIHSRIGRVVFGVRNAKTGAAGSLMDVLHYPGMNHRVEITEGILADECAALLCYFFRMPRSGGSSGGSSGSETPGTSESATPESSGGSSGGSDKKYSIGLAIGTNSVGWAVITDEYKVPSKKFKVLGNTDRHSIKKNLIGALLFDSGETAEATRLKRTARRRYTRRKNRICYLQEIFSNEMAKVDDSFFHRLEESFLVEEDKKHERHPIFGNIVDEVAYHEKYPTIYHLRKKLVDSTDKADLRLIYLALAHMIKFRGHFLIEGDLNPDNSDVDKLFIQLVQTYNQLFEENPINASGVDAKAILSARLSKSRRLENLIAQLPGEKKNGLFGNLIALSLGLTPNFKSNFDLAEDAKLQLSKDTYDDDLDNLLAQIGDQYADLFLAAKNLSDAILLSDILRVNTEITKAPLSASMIKRYDEHHQDLTLLKALVRQQLPEKYKEIFFDQSKNGYAGYIDGGASQEEFYKFIKPILEKMDGTEELLVKLNREDLLRKQRTFDNGSIPHQIHLGELHAILRRQEDFYPFLKDNREKIEKILTFRIPYYVGPLARGNSRFAWMTRKSEETITPWNFEEVVDKGASAQSFIERMTNFDKNLPNEKVLPKHSLLYEYFTVYNELTKVKYVTEGMRKPAFLSGEQKKAIVDLLFKTNRKVTVKQLKEDYFKKIECFDSVEISGVEDRFNASLGTYHDLLKIIKDKDFLDNEENEDILEDIVLTLTLFEDREMIEERLKTYAHLFDDKVMKQLKRRRYTGWGRLSRKLINGIRDKQSGKTILDFLKSDGFANRNFMQLIHDDSLTFKEDIQKAQVSGQGDSLHEHIANLAGSPAIKKGILQTVKVVDELVKVMGRHKPENIVIEMARENQTTQKGQKNSRERMKRIEEGIKELGSQILKEHPVENTQLQNEKLYLYYLQNGRDMYVDQELDINRLSDYDVDHIVPQSFLKDDSIDNKVLTRSDKNRGKSDNVPSEEVVKKMKNYWRQLLNAKLITQRKFDNLTKAERGGLSELDKAGFIKRQLVETRQITKHVAQILDSRMNTKYDENDKLIREVKVITLKSKLVSDFRKDFQFYKVREINNYHHAHDAYLNAVVGTALIKKYPKLESEFVYGDYKVYDVRKMIAKSEQEIGKATAKYFFYSNIMNFFKTEITLANGEIRKRPLIETNGETGEIVWDKGRDFATVRKVLSMPQVNIVKKTEVQTGGFSKESILPKRNSDKLIARKKDWDPKKYGGFDSPTVAYSVLVVAKVEKGKSKKLKSVKELLGITIMERSSFEKNPIDFLEAKGYKEVKKDLIIKLPKYSLFELENGRKRMLASAGELQKGNELALPSKYVNFLYLASHYEKLKGSPEDNEQKQLFVEQHKHYLDEIIEQISEFSKRVILADANLDKVLSAYNKHRDKPIREQAENIIHLFTLTNLGAPAAFKYFDTTIDRKRYTSTKEVLDATLIHQSITGLYETRIDLSQLGGD

SEQ ID NO: 147 - protein, 1541 aa, Artificial Sequence
  Description of Artificial Sequence: Synthetic polypeptide
MDKKYSIGLAIGTNSVGWAVITDEYKVPSKKFKVLGNTDRHSIKKNLIGALLFDSGETAEATRLKRTARRRYTRRKNRICYLQEIFSNEMAKVDDSFFHRLEESFLVEEDKKHERHPIFGNIVDEVAYHEKYPTIYHLRKKLVDSTDKADLRLIYLALAHMIKFRGHFLIEGDLNPDNSDVDKLFIQLVQTYNQLFEENPINASGVDAKAILSARLSKSRRLENLIAQLPGEKKNGLFGNLIALSLGLTPNFKSNFDLAEDAKLQLSKDTYDDDLDNLLAQIGDQYADLFLAAKNLSDAILLSDILRVNTEITKAPLSASMIKRYDEHHQDLTLLKALVRQQLPEKYKEIFFDQSKNGYAGYIDGGASQEEFYKFIKPILEKMDGTEELLVKLNREDLLRKQRTFDNGSIPHQIHLGELHAILRRQEDFYPFLKDNREKIEKILTFRIPYYVGPLARGNSRFAWMTRKSEETITPWNFEEVVDKGASAQSFIERMTNFDKNLPNEKVLPKHSLLYEYFTVYNELTKVKYVTEGMRKPAFLSGEQKKAIVDLLFKTNRKVTVKQLKEDYFKKIECFDSVEISGVEDRFNASLGTYHDLLKIIKDKDFLDNEENEDILEDIVLTLTLFEDREMIEERLKTYAHLFDDKVMKQLKRRRYTGWGRLSRKLINGIRDKQSGKTILDFLKSDGFANRNFMQLIHDDSLTFKEDIQKAQVSGQGDSLHEHIANLAGSPAIKKGILQTVKVVDELVKVMGRHKPENIVIEMARENQTTQKGQKNSRERMKRIEEGIKELGSQILKEHPVENTQLQNEKLYLYYLQNGRDMYVDQELDINRLSDYDVDHIVPQSFLKDDSIDNKVLTRSDKNRGKSDNVPSEEVVKKMKNYWRQLLNAKLITQRKFDNLTKAERGGLSELDKAGFIKRQLVETRQITKHVAQILDSRMNTKYDENDKLIREVKVITLKSKLVSDFRKDFQFYKVREINNYHHAHDAYLNAVVGTALIKKYPKGSSGSETPGTSESATPESSGSEVEFSHEYWMRHALTLAKRARDEREVPVGAVLVLNNRVIGEGWNRAIGLHDPTAHAEIMALRQGGLVMQNYRLIDATLYVTFEPCVMCAGAMIHSRIGRVVFGVRNAKTGAAGSLMDVLHYPGMNHRVEITEGILADECAALLCYFFRMPRQLESEFVYGDYKVYDVRKMIAKSEQEIGKATAKYFFYSNIMNFFKTEITLANGEIRKRPLIETNGETGEIVWDKGRDFATVRKVLSMPQVNIVKKTEVQTGGFSKESILPKRNSDKLIARKKDWDPKKYGGFDSPTVAYSVLVVAKVEKGKSKKLKSVKELLGITIMERSSFEKNPIDFLEAKGYKEVKKDLIIKLPKYSLFELENGRKRMLASAGELQKGNELALPSKYVNFLYLASHYEKLKGSPEDNEQKQLFVEQHKHYLDEIIEQISEFSKRVILADANLDKVLSAYNKHRDKPIREQAENIIHLFTLTNLGAPAAFKYFDTTIDRKRYTSTKEVLDATLIHQSITGLYETRIDLSQLGGD

SEQ ID NO: 148 - protein, 1541 aa, Artificial Sequence
  Description of Artificial Sequence: Synthetic polypeptide
MDKKYSIGLAIGTNSVGWAVITDEYKVPSKKFKVLGNTDRHSIKKNLIGALLFDSGETAEATRLKRTARRRYTRRKNRICYLQEIFSNEMAKVDDSFFHRLEESFLVEEDKKHERHPIFGNIVDEVAYHEKYPTIYHLRKKLVDSTDKADLRLIYLALAHMIKFRGHFLIEGDLNPDNSDVDKLFIQLVQTYNQLFEENPINASGVDAKAILSARLSKSRRLENLIAQLPGEKKNGLFGNLIALSLGLTPNFKSNFDLAEDAKLQLSKDTYDDDLDNLLAQIGDQYADLFLAAKNLSDAILLSDILRVNTEITKAPLSASMIKRYDEHHQDLTLLKALVRQQLPEKYKEIFFDQSKNGYAGYIDGGASQEEFYKFIKPILEKMDGTEELLVKLNREDLLRKQRTFDNGSIPHQIHLGELHAILRRQEDFYPFLKDNREKIEKILTFRIPYYVGPLARGNSRFAWMTRKSEETITPWNFEEVVDKGASAQSFIERMTNFDKNLPNEKVLPKHSLLYEYFTVYNELTKVKYVTEGMRKPAFLSGEQKKAIVDLLFKTNRKVTVKQLKEDYFKKIECFDSVEISGVEDRFNASLGTYHDLLKIIKDKDFLDNEENEDILEDIVLTLTLFEDREMIEERLKTYAHLFDDKVMKQLKRRRYTGWGRLSRKLINGIRDKQSGKTILDFLKSDGFANRNFMQLIHDDSLTFKEDIQKAQVSGQGDSLHEHIANLAGSPAIKKGILQTVKVVDELVKVMGRHKPENIVIEMARENQTTQKGQKNSRERMKRIEEGIKELGSQILKEHPVENTQLQNEKLYLYYLQNGRDMYVDQELDINRLSDYDVDHIVPQSFLKDDSIDNKVLTRSDKNRGKSDNVPSEEVVKKMKNYWRQLLNAKLITQRKFDNLTKAERGGLSELDKAGFIKRQLVETRQITKHVAQILDSRMNTKYDENDKLIREVKVITLKSKLVSDFRKDFQFYKVREINNYHHAHDAYLNAVVGTALIKKYPKLGSSGSETPGTSESATPESSGSEVEFSHEYWMRHALTLAKRARDEREVPVGAVLVLNNRVIGEGWNRAIGLHDPTAHAEIMALRQGGLVMQNYRLIDATLYVTFEPCVMCAGAMIHSRIGRVVFGVRNAKTGAAGSLMDVLHYPGMNHRVEITEGILADECAALLCYFFRMPRQESEFVYGDYKVYDVRKMIAKSEQEIGKATAKYFFYSNIMNFFKTEITLANGEIRKRPLIETNGETGEIVWDKGRDFATVRKVLSMPQVNIVKKTEVQTGGFSKESILPKRNSDKLIARKKDWDPKKYGGFDSPTVAYSVLVVAKVEKGKSKKLKSVKELLGITIMERSSFEKNPIDFLEAKGYKEVKKDLIIKLPKYSLFELENGRKRMLASAGELQKGNELALPSKYVNFLYLASHYEKLKGSPEDNEQKQLFVEQHKHYLDEIIEQISEFSKRVILADANLDKVLSAYNKHRDKPIREQAENIIHLFTLTNLGAPAAFKYFDTTIDRKRYTSTKEVLDATLIHQSITGLYETRIDLSQLGGD

SEQ ID NO: 149 - protein, 1541 aa, Artificial Sequence
  Description of Artificial Sequence: Synthetic polypeptide
MDKKYSIGLAIGTNSVGWAVITDEYKVPSKKFKVLGNTDRHSIKKNLIGALLFDSGETAEATRLKRTARRRYTRRKNRICYLQEIFSNEMAKVDDSFFHRLEESFLVEEDKKHERHPIFGNIVDEVAYHEKYPTIYHLRKKLVDSTDKADLRLIYLALAHMIKFRGHFLIEGDLNPDNSDVDKLFIQLVQTYNQLFEENPINASGVDAKAILSARLSKSRRLENLIAQLPGEKKNGLFGNLIALSLGLTPNFKSNFDLAEDAKLQLSKDTYDDDLDNLLAQIGDQYADLFLAAKNLSDAILLSDILRVNTEITKAPLSASMIKRYDEHHQDLTLLKALVRQQLPEKYKEIFFDQSKNGYAGYIDGGASQEEFYKFIKPILEKMDGTEELLVKLNREDLLRKQRTFDNGSIPHQIHLGELHAILRRQEDFYPFLKDNREKIEKILTFRIPYYVGPLARGNSRFAWMTRKSEETITPWNFEEVVDKGASAQSFIERMTNFDKNLPNEKVLPKHSLLYEYFTVYNELTKVKYVTEGMRKPAFLSGEQKKAIVDLLFKTNRKVTVKQLKEDYFKKIECFDSVEISGVEDRFNASLGTYHDLLKIIKDKDFLDNEENEDILEDIVLTLTLFEDREMIEERLKTYAHLFDDKVMKQLKRRRYTGWGRLSRKLINGIRDKQSGKTILDFLKSDGFANRNFMQLIHDDSLTFKEDIQKAQVSGQGDSLHEHIANLAGSPAIKKGILQTVKVVDELVKVMGRHKPENIVIEMARENQTTQKGQKNSRERMKRIEEGIKELGSQILKEHPVENTQLQNEKLYLYYLQNGRDMYVDQELDINRLSDYDVDHIVPQSFLKDDSIDNKVLTRSDKNRGKSDNVPSEEVVKKMKNYWRQLLNAKLITQRKFDNLTKAERGGLSELDKAGFIKRQLVETRQITKHVAQILDSRMNTKYDENDKLIREVKVITLKSKLVSDFRKDFQFYKVREINNYHHAHDAYLNAVVGTALIKKYPKLEGSSGSETPGTSESATPESSGSEVEFSHEYWMRHALTLAKRARDEREVPVGAVLVLNNRVIGEGWNRAIGLHDPTAHAEIMALRQGGLVMQNYRLIDATLYVTFEPCVMCAGAMIHSRIGRVVFGVRNAKTGAAGSLMDVLHYPGMNHRVEITEGILADECAALLCYFFRMPRQSEFVYGDYKVYDVRKMIAKSEQEIGKATAKYFFYSNIMNFFKTEITLANGEIRKRPLIETNGETGEIVWDKGRDFATVRKVLSMPQVNIVKKTEVQTGGFSKESILPKRNSDKLIARKKDWDPKKYGGFDSPTVAYSVLVVAKVEKGKSKKLKSVKELLGITIMERSSFEKNPIDFLEAKGYKEVKKDLIIKLPKYSLFELENGRKRMLASAGELQKGNELALPSKYVNFLYLASHYEKLKGSPEDNEQKQLFVEQHKHYLDEIIEQISEFSKRVILADANLDKVLSAYNKHRDKPIREQAENIIHLFTLTNLGAPAAFKYFDTTIDRKRYTSTKEVLDATLIHQSITGLYETRIDLSQLGGD

SEQ ID NO: 150 - protein, 1541 aa, Artificial Sequence
  Description of Artificial Sequence: Synthetic polypeptide
MDKKYSIGLAIGTNSVGWAVITDEYKVPSKKFKVLGNTDRHSIKKNLIGALLFDSGETAEATRLKRTARRRYTRRKNRICYLQEIFSNEMAKVDDSFFHRLEESFLVEEDKKHERHPIFGNIVDEVAYHEKYPTIYHLRKKLVDSTDKADLRLIYLALAHMIKFRGHFLIEGDLNPDNSDVDKLFIQLVQTYNQLFEENPINASGVDAKAILSARLSKSRRLENLIAQLPGEKKNGLFGNLIALSLGLTPNFKSNFDLAEDAKLQLSKDTYDDDLDNLLAQIGDQYADLFLAAKNLSDAILLSDILRVNTEITKAPLSASMIKRYDEHHQDLTLLKALVRQQLPEKYKEIFFDQSKNGYAGYIDGGASQEEFYKFIKPILEKMDGTEELLVKLNREDLLRKQRTFDNGSIPHQIHLGELHAILRRQEDFYPFLKDNREKIEKILTFRIPYYVGPLARGNSRFAWMTRKSEETITPWNFEEVVDKGASAQSFIERMTNFDKNLPNEKVLPKHSLLYEYFTVYNELTKVKYVTEGMRKPAFLSGEQKKAIVDLLFKTNRKVTVKQLKEDYFKKIECFDSVEISGVEDRFNASLGTYHDLLKIIKDKDFLDNEENEDILEDIVLTLTLFEDREMIEERLKTYAHLFDDKVMKQLKRRRYTGWGRLSRKLINGIRDKQSGKTILDFLKSDGFANRNFMQLIHDDSLTFKEDIQKAQVSGQGDSLHEHIANLAGSPAIKKGILQTVKVVDELVKVMGRHKPENIVIEMARENQTTQKGQKNSRERMKRIEEGIKELGSQILKEHPVENTQLQNEKLYLYYLQNGRDMYVDQELDINRLSDYDVDHIVPQSFLKDDSIDNKVLTRSDKNRGKSDNVPSEEVVKKMKNYWRQLLNAKLITQRKFDNLTKAERGGLSELDKAGFIKRQLVETRQITKHVAQILDSRMNTKYDENDKLIREVKVITLKSKLVSDFRKDFQFYKVREINNYHHAHDAYLNAVVGTALIKKYPKLESGSSGSETPGTSESATPESSGSEVEFSHEYWMRHALTLAKRARDEREVPVGAVLVLNNRVIGEGWNRAIGLHDPTAHAEIMALRQGGLVMQNYRLIDATLYVTFEPCVMCAGAMIHSRIGRVVFGVRNAKTGAAGSLMDVLHYPGMNHRVEITEGILADECAALLCYFFRMPRQEFVYGDYKVYDVRKMIAKSEQEIGKATAKYFFYSNIMNFFKTEITLANGEIRKRPLIETNGETGEIVWDKGRDFATVRKVLSMPQVNIVKKTEVQTGGFSKESILPKRNSDKLIARKKDWDPKKYGGFDSPTVAYSVLVVAKVEKGKSKKLKSVKELLGITIMERSSFEKNPIDFLEAKGYKEVKKDLIIKLPKYSLFELENGRKRMLASAGELQKGNELALPSKYVNFLYLASHYEKLKGSPEDNEQKQLFVEQHKHYLDEIIEQISEFSKRVILADANLDKVLSAYNKHRDKPIREQAENIIHLFTLTNLGAPAAFKYFDTTIDRKRYTSTKEVLDATLIHQSITGLYETRIDLSQLGGD

SEQ ID NO: 151 - protein, 1541 aa, Artificial Sequence
  Description of Artificial Sequence: Synthetic polypeptide
MDKKYSIGLAIGTNSVGWAVITDEYKVPSKKFKVLGNTDRHSIKKNLIGALLFDSGETAEATRLKRTARRRYTRRKNRICYLQEIFSNEMAKVDDSFFHRLEESFLVEEDKKHERHPIFGNIVDEVAYHEKYPTIYHLRKKLVDSTDKADLRLIYLALAHMIKFRGHFLIEGDLNPDNSDVDKLFIQLVQTYNQLFEENPINASGVDAKAILSARLSKSRRLENLIAQLPGEKKNGLFGNLIALSLGLTPNFKSNFDLAEDAKLQLSKDTYDDDLDNLLAQIGDQYADLFLAAKNLSDAILLSDILRVNTEITKAPLSASMIKRYDEHHQDLTLLKALVRQQLPEKYKEIFFDQSKNGYAGYIDGGASQEEFYKFIKPILEKMDGTEELLVKLNREDLLRKQRTFDNGSIPHQIHLGELHAILRRQEDFYPFLKDNREKIEKILTFRIPYYVGPLARGNSRFAWMTRKSEETITPWNFEEVVDKGASAQSFIERMTNFDKNLPNEKVLPKHSLLYEYFTVYNELTKVKYVTEGMRKPAFLSGEQKKAIVDLLFKTNRKVTVKQLKEDYFKKIECFDSVEISGVEDRFNASLGTYHDLLKIIKDKDFLDNEENEDILEDIVLTLTLFEDREMIEERLKTYAHLFDDKVMKQLKRRRYTGWGRLSRKLINGIRDKQSGKTILDFLKSDGFANRNFMQLIHDDSLTFKEDIQKAQVSGQGDSLHEHIANLAGSPAIKKGILQTVKVVDELVKVMGRHKPENIVIEMARENQTTQKGQKNSRERMKRIEEGIKELGGSSGSETPGTSESATPESSGSEVEFSHEYWMRHALTLAKRARDEREVPVGAVLVLNNRVIGEGWNRAIGLHDPTAHAEIMALRQGGLVMQNYRLIDATLYVTFEPCVMCAGAMIHSRIGRVVFGVRNAKTGAAGSLMDVLHYPGMNHRVEITEGILADECAALLCYFFRMPRQSQILKEHPVENTQLQNEKLYLYYLQNGRDMYVDQELDINRLSDYDVDHIVPQSFLKDDSIDNKVLTRSDKNRGKSDNVPSEEVVKKMKNYWRQLLNAKLITQRKFDNLTKAERGGLSELDKAGFIKRQLVETRQITKHVAQILDSRMNTKYDENDKLIREVKVITLKSKLVSDFRKDFQFYKVREINNYHHAHDAYLNAVVGTALIKKYPKLESEFVYGDYKVYDVRKMIAKSEQEIGKATAKYFFYSNIMNFFKTEITLANGEIRKRPLIETNGETGEIVWDKGRDFATVRKVLSMPQVNIVKKTEVQTGGFSKESILPKRNSDKLIARKKDWDPKKYGGFDSPTVAYSVLVVAKVEKGKSKKLKSVKELLGITIMERSSFEKNPIDFLEAKGYKEVKKDLIIKLPKYSLFELENGRKRMLASAGELQKGNELALPSKYVNFLYLASHYEKLKGSPEDNEQKQLFVEQHKHYLDEIIEQISEFSKRVILADANLDKVLSAYNKHRDKPIREQAENIIHLFTLTNLGAPAAFKYFDTTIDRKRYTSTKEVLDATLIHQSITGLYETRIDLSQLGGD

SEQ ID NO: 152 - protein, 1541 aa, Artificial Sequence
  Description of Artificial Sequence: Synthetic polypeptide
MDKKYSIGLAIGTNSVGWAVITDEYKVPSKKFKVLGNTDRHSIKKNLIGALLFDSGETAEATRLKRTARRRYTRRKNRICYLQEIFSNEMAKVDDSFFHRLEESFLVEEDKKHERHPIFGNIVDEVAYHEKYPTIYHLRKKLVDSTDKADLRLIYLALAHMIKFRGHFLIEGDLNPDNSDVDKLFIQLVQTYNQLFEENPINASGVDAKAILSARLSKSRRLENLIAQLPGEKKNGLFGNLIALSLGLTPNFKSNFDLAEDAKLQLSKDTYDDDLDNLLAQIGDQYADLFLAAKNLSDAILLSDILRVNTEITKAPLSASMIKRYDEHHQDLTLLKALVRQQLPEKYKEIFFDQSKNGYAGYIDGGASQEEFYKFIKPILEKMDGTEELLVKLNREDLLRKQRTFDNGSIPHQIHLGELHAILRRQEDFYPFLKDNREKIEKILTFRIPYYVGPLARGNSRFAWMTRKSEETITPWNFEEVVDKGASAQSFIERMTNFDKNLPNEKVLPKHSLLYEYFTVYNELTKVKYVTEGMRKPAFLSGEQKKAIVDLLFKTNRKVTVKQLKEDYFKKIECFDSVEISGVEDRFNASLGTYHDLLKIIKDKDFLDNEENEDILEDIVLTLTLFEDREMIEERLKTYAHLFDDKVMKQLKRRRYTGWGRLSRKLINGIRDKQSGKTILDFLKSDGFANRNFMQLIHDDSLTFKEDIQKAQVSGQGDSLHEHIANLAGSPAIKKGILQTVKVVDELVKVMGRHKPENIVIEMARENQTTQKGQKNSRERMKRIEEGIKELGSSGSETPGTSESATPESSGSEVEFSHEYWMRHALTLAKRARDEREVPVGAVLVLNNRVIGEGWNRAIGLHDPTAHAEIMALRQGGLVMQNYRLIDATLYVTFEPCVMCAGAMIHSRIGRVVFGVRNAKTGAAGSLMDVLHYPGMNHRVEITEGILADECAALLCYFFRMPRQGSQILKEHPVENTQLQNEKLYLYYLQNGRDMYVDQELDINRLSDYDVDHIVPQSFLKDDSIDNKVLTRSDKNRGKSDNVPSEEVVKKMKNYWRQLLNAKLITQRKFDNLTKAERGGLSELDKAGFIKRQLVETRQITKHVAQILDSRMNTKYDENDKLIREVKVITLKSKLVSDFRKDFQFYKVREINNYHHAHDAYLNAVVGTALIKKYPKLESEFVYGDYKVYDVRKMIAKSEQEIGKATAKYFFYSNIMNFFKTEITLANGEIRKRPLIETNGETGEIVWDKGRDFATVRKVLSMPQVNIVKKTEVQTGGFSKESILPKRNSDKLIARKKDWDPKKYGGFDSPTVAYSVLVVAKVEKGKSKKLKSVKELLGITIMERSSFEKNPIDFLEAKGYKEVKKDLIIKLPKYSLFELENGRKRMLASAGELQKGNELALPSKYVNFLYLASHYEKLKGSPEDNEQKQLFVEQHKHYLDEIIEQISEFSKRVILADANLDKVLSAYNKHRDKPIREQAENIIHLFTLTNLGAPAAFKYFDTTIDRKRYTSTKEVLDATLIHQSITGLYETRIDLSQLGGD

SEQ ID NO: 153 - protein, 1541 aa, Artificial Sequence
  Description of Artificial Sequence: Synthetic polypeptide
MDKKYSIGLAIGTNSVGWAVITDEYKVPSKKFKVLGNTDRHSIKKNLIGALLFDSGETAEATRLKRTARRRYTRRKNRICYLQEIFSNEMAKVDDSFFHRLEESFLVEEDKKHERHPIFGNIVDEVAYHEKYPTIYHLRKKLVDSTDKADLRLIYLALAHMIKFRGHFLIEGDLNPDNSDVDKLFIQLVQTYNQLFEENPINASGVDAKAILSARLSKSRRLENLIAQLPGEKKNGLFGNLIALSLGLTPNFKSNFDLAEDAKLQLSKDTYDDDLDNLLAQIGDQYADLFLAAKNLSDAILLSDILRVNTEITKAPLSASMIKRYDEHHQDLTLLKALVRQQLPEKYKEIFFDQSKNGYAGYIDGGASQEEFYKFIKPILEKMDGTEELLVKLNREDLLRKQRTFDNGSIPHQIHLGELHAILRRQEDFYPFLKDNREKIEKILTFRIPYYVGPLARGNSRFAWMTRKSEETITPWNFEEVVDKGASAQSFIERMTNFDKNLPNEKVLPKHSLLYEYFTVYNELTKVKYVTEGMRKPAFLSGEQKKAIVDLLFKTNRKVTVKQLKEDYFKKIECFDSVEISGVEDRFNASLGTYHDLLKIIKDKDFLDNEENEDILEDIVLTLTLFEDREMIEERLKTYAHLFDDKVMKQLKRRRYTGWGRLSRKLINGIRDKQSGKTILDFLKSDGFANRNFMQLIHDDSLTFKEDIQKAQVSGQGDSLHEHIANLAGSPAIKKGILQTVKVVDELVKVMGRHKPENIVIEMARENQTTQKGQKNSRERMKRIEEGIKEGSSGSETPGTSESATPESSGSEVEFSHEYWMRHALTLAKRARDEREVPVGAVLVLNNRVIGEGWNRAIGLHDPTAHAEIMALRQGGLVMQNYRLIDATLYVTFEPCVMCAGAMIHSRIGRVVFGVRNAKTGAAGSLMDVLHYPGMNHRVEITEGILADECAALLCYFFRMPRQLGSQILKEHPVENTQLQNEKLYLYYLQNGRDMYVDQELDINRLSDYDVDHIVPQSFLKDDSIDNKVLTRSDKNRGKSDNVPSEEVVKKMKNYWRQLLNAKLITQRKFDNLTKAERGGLSELDKAGFIKRQLVETRQITKHVAQILDSRMNTKYDENDKLIREVKVITLKSKLVSDFRKDFQFYKVREINNYHHAHDAYLNAVVGTALIKKYPKLESEFVYGDYKVYDVRKMIAKSEQEIGKATAKYFFYSNIMNFFKTEITLANGEIRKRPLIETNGETGEIVWDKGRDFATVRKVLSMPQVNIVKKTEVQTGGFSKESILPKRNSDKLIARKKDWDPKKYGGFDSPTVAYSVLVVAKVEKGKSKKLKSVKELLGITIMERSSFEKNPIDFLEAKGYKEVKKDLIIKLPKYSLFELENGRKRMLASAGELQKGNELALPSKYVNFLYLASHYEKLKGSPEDNEQKQLFVEQHKHYLDEIIEQISEFSKRVILADANLDKVLSAYNKHRDKPIREQAENIIHLFTLTNLGAPAAFKYFDTTIDRKRYTSTKEVLDATLIHQSITGLYETRIDLSQLGGD

SEQ ID NO: 154 - protein, 1484 aa, Artificial Sequence
  Description of Artificial Sequence: Synthetic polypeptide
MDKKYSIGLAIGTNSVGWAVITDEYKVPSKKFKVLGNTDRHSIKKNLIGALLFDSGETAEATRLKRTARRRYTRRKNRICYLQEIFSNEMAKVDDSFFHRLEESFLVEEDKKHERHPIFGNIVDEVAYHEKYPTIYHLRKKLVDSTDKADLRLIYLALAHMIKFRGHFLIEGDLNPDNSDVDKLFIQLVQTYNQLFEENPINASGVDAKAILSARLSKSRRLENLIAQLPGEKKNGLFGNLIALSLGLTPNFKSNFDLAEDAKLQLSKDTYDDDLDNLLAQIGDQYADLFLAAKNLSDAILLSDILRVNTEITKAPLSASMIKRYDEHHQDLTLLKALVRQQLPEKYKEIFFDQSKNGYAGYIDGGASQEEFYKFIKPILEKMDGTEELLVKLNREDLLRKQRTFDNGSIPHQIHLGELHAILRRQEDFYPFLKDNREKIEKILTFRIPYYVGPLARGNSRFAWMTRKSEETITPWNFEEVVDKGASAQSFIERMTNFDKNLPNEKVLPKHSLLYEYFTVYNELTKVKYVTEGMRKPAFLSGEQKKAIVDLLFKTNRKVTVKQLKEDYFKKIECFDSVEISGVEDRFNASLGTYHDLLKIIKDKDFLDNEENEDILEDIVLTLTLFEDREMIEERLKTYAHLFDDKVMKQLKRRRYTGWGRLSRKLINGIRDKQSGKTILDFLKSDGFANRNFMQLIHDDSLTFKEDIQKAQVSGQGDSLHEHIANLAGSPAIKKGILQTVKVVDELVKVMGRHKPENIVIEMARENQTTQKGQKNSRERMKRIEEGIKELGSQILKEHPVENTQLQNEKLYLYYLQNGRDMYVDQELDINRLSDYDVDHIVPQSFLKDDSIDNKVLTRSDKNRGKSDNVPSEEVVKKMKNYWRQLLNAKLITQRKFDNLTKAERGGLSELDKAGFIKRQLVETRQITKHVAQILDSRMNTKYDENDKLIREVKVITLKSKLVSDFRKDFQFYKVREINNYHHAHDAYLNAVVGTALIKKYPKLESEFVYGDYKVYSSGSEVEFSHEYWMRHALTLAKRARDEREVPVGAVLVLNNRVIGEGWNRAIGLHDPTAHAEIMALRQGGLVMQNYRLIDATLYVTFEPCVMCAGAMIHSRIGRVVFGVRNAKTGAAGSLMDVLHYPGMNHRVEITEGILADECAALLCYFFRMPRQVFNAQKKAQSSTDGEIVWDKGRDFATVRKVLSMPQVNIVKKTEVQTGGFSKESILPKRNSDKLIARKKDWDPKKYGGFDSPTVAYSVLVVAKVEKGKSKKLKSVKELLGITIMERSSFEKNPIDFLEAKGYKEVKKDLIIKLPKYSLFELENGRKRMLASAGELQKGNELALPSKYVNFLYLASHYEKLKGSPEDNEQKQLFVEQHKHYLDEIIEQISEFSKRVILADANLDKVLSAYNKHRDKPIREQAENIIHLFTLTNLGAPAAFKYFDTTIDRKRYTSTKEVLDATLIHQSITGLYETRIDLSQLGGD

SEQ ID NO: 155 - protein, 1554 aa, Artificial Sequence
  Description of Artificial Sequence: Synthetic polypeptide
MDKKYSIGLAIGTNSVGWAVITDEYKVPSKKFKVLGNTDRHSIKKNLIGALLFDSGETAEATRLKRTARRRYTRRKNRICYLQEIFSNEMAKVDDSFFHRLEESFLVEEDKKHERHPIFGNIVDEVAYHEKYPTIYHLRKKLVDSTDKADLRLIYLALAHMIKFRGHFLIEGDLNPDNSDVDKLFIQLVQTYNQLFEENPINASGVDAKAILSARLSKSRRLENLIAQLPGEKKNGLFGNLIALSLGLTPNFKSNFDLAEDAKLQLSKDTYDDDLDNLLAQIGDQYADLFLAAKNLSDAILLSDILRVNTEITKAPLSASMIKRYDEHHQDLTLLKALVRQQLPEKYKEIFFDQSKNGYAGYIDGGASQEEFYKFIKPILEKMDGTEELLVKLNREDLLRKQRTFDNGSIPHQIHLGELHAILRRQEDFYPFLKDNREKIEKILTFRIPYYVGPLARGNSRFAWMTRKSEETITPWNFEEVVDKGASAQSFIERMTNFDKNLPNEKVLPKHSLLYEYFTVYNELTKVKYVTEGMRKPAFLSGEQKKAIVDLLFKTNRKVTVKQLKEDYFKKIECFDSVEISGVEDRFNASLGTYHDLLKIIKDKDFLDNEENEDILEDIVLTLTLFEDREMIEERLKTYAHLFDDKVMKQLKRRRYTGWGRLSRKLINGIRDKQSGKTILDFLKSDGFANRNFMQLIHDDSLTFKEDIQKAQVSGQGDSLHEHIANLAGSPAIKKGILQTVKVVDELVKVMGRHKPENIVIEMARENQTTQKGQKNSRERMKRIEEGIKELGSQILKEHPVENTQLQNEKLYLYYLQNGRDMYVDQELDINRLSDYDVDHIVPQSFLKDDSIDNKVLTRSDKNRGKSDNVPSEEVVKKMKNYWRQLLNAKLITQRKFDNLTKAERGGLSELDKAGFIKRQLVETRQITKHVAQILDSRMNTKYDENDKLIREVKVITLKSKLVSDFRKDFQFYKVREINNYHHAHDAYLNAVVGTALIKKYPKLESEFVYGDYKVYDVRKMIAKSEQEIGKATAKYFFYSNIMNFFKTEITLANGEIRKRPLIETNMNHRVEITEGILADECAALLCYFFRMPRQVFNAQKKAQSSTDGSSGSETPGTSESATPESSGSEVEFSHEYWMRHALTLAKRARDEREVPVGAVLVLNNRVIGEGWNRAIGLHDPTAHAEIMALRQGGLVMQNYRLIDATLYVTFEPCVMCAGAMIHSRIGRVVFGVRNAKTGAAGSLMDVLHYPGGETGEIVWDKGRDFATVRKVLSMPQVNIVKKTEVQTGGFSKESILPKRNSDKLIARKKDWDPKKYGGFDSPTVAYSVLVVAKVEKGKSKKLKSVKELLGITIMERSSFEKNPIDFLEAKGYKEVKKDLIIKLPKYSLFELENGRKRMLASAGELQKGNELALPSKYVNFLYLASHYEKLKGSPEDNEQKQLFVEQHKHYLDEIIEQISEFSKRVILADANLDKVLSAYNKHRDKPIREQAENIIHLFTLTNLGAPAAFKYFDTTIDRKRYTSTKEVLDATLIHQSITGLYETRIDLSQLGGD

SEQ ID NO: 156 - protein, 1554 aa, Artificial Sequence
  Description of Artificial Sequence: Synthetic polypeptide
MDKKYSIGLAIGTNSVGWAVITDEYKVPSKKFKVLGNTDRHSIKKNLIGALLFDSGETAEATRLKRTARRRYTRRKNRICYLQEIFSNEMAKVDDSFFHRLEESFLVEEDKKHERHPIFGNIVDEVAYHEKYPTIYHLRKKLVDSTDKADLRLIYLALAHMIKFRGHFLIEGDLNPDNSDVDKLFIQLVQTYNQLFEENPINASGVDAKAILSARLSKSRRLENLIAQLPGEKKNGLFGNLIALSLGLTPNFKSNFDLAEDAKLQLSKDTYDDDLDNLLAQIGDQYADLFLAAKNLSDAILLSDILRVNTEITKAPLSASMIKRYDEHHQDLTLLKALVRQQLPEKYKEIFFDQSKNGYAGYIDGGASQEEFYKFIKPILEKMDGTEELLVKLNREDLLRKQRTFDNGSIPHQIHLGELHAILRRQEDFYPFLKDNREKIEKILTFRIPYYVGPLARGNSRFAWMTRKSEETITPWNFEEVVDKGASAQSFIERMTNFDKNLPNEKVLPKHSLLYEYFTVYNELTKVKYVTEGMRKPAFLSGEQKKAIVDLLFKTNRKVTVKQLKEDYFKKIECFDSVEISGVEDRFNASLGTYHDLLKIIKDKDFLDNEENEDILEDIVLTLTLFEDREMIEERLKTYAHLFDDKVMKQLKRRRYTGWGRLSRKLINGIRDKQSGKTILDFLKSDGFANRNFMQLIHDDSGSSGSETPGTSESATPESSGSEVEFSHEYWMRHALTLAKRARDEREVPVGAVLVLNNRVIGEGWNRAIGLHDPTAHAEIMALRQGGLVMQNYRLIDATLYVTFEPCVMCAGAMIHSRIGRVVFGVRNAKTGAAGSLMDVLHYPGMNHRVEITEGILADECAALLCYFFRMPRQVFNAQKKAQSSTDLTFKEDIQKAQVSGQGDSLHEHIANLAGSPAIKKGILQTVKVVDELVKVMGRHKPENIVIEMARENQTTQKGQKNSRERMKRIEEGIKELGSQILKEHPVENTQLQNEKLYLYYLQNGRDMYVDQELDINRLSDYDVDHIVPQSFLKDDSIDNKVLTRSDKNRGKSDNVPSEEVVKKMKNYWRQLLNAKLITQRKFDNLTKAERGGLSELDKAGFIKRQLVETRQITKHVAQILDSRMNTKYDENDKLIREVKVITLKSKLVSDFRKDFQFYKVREINNYHHAHDAYLNAVVGTALIKKYPKLESEFVYGDYKVYDVRKMIAKSEQEIGKATAKYFFYSNIMNFFKTEITLANGEIRKRPLIETNGETGEIVWDKGRDFATVRKVLSMPQVNIVKKTEVQTGGFSKESILPKRNSDKLIARKKDWDPKKYGGFDSPTVAYSVLVVAKVEKGKSKKLKSVKELLGITIMERSSFEKNPIDFLEAKGYKEVKKDLIIKLPKYSLFELENGRKRMLASAGELQKGNELALPSKYVNFLYLASHYEKLKGSPEDNEQKQLFVEQHKHYLDEIIEQISEFSKRVILADANLDKVLSAYNKHRDKPIREQAENIIHLFTLTNLGAPAAFKYFDTTIDRKRYTSTKEVLDATLIHQSITGLYETRIDLSQLGGD

SEQ ID NO: 157 - protein, 1554 aa, Artificial Sequence
  Description of Artificial Sequence: Synthetic polypeptide
MDKKYSIGLAIGTNSVGWAVITDEYKVPSKKFKVLGNTDRHSIKKNLIGALLFDSGETAEATRLKRTARRRYTRRKNRICYLQEIFSNEMAKVDDSFFHRLEESFLVEEDKKHERHPIFGNIVDEVAYHEKYPTIYHLRKKLVDSTDKADLRLIYLALAHMIKFRGHFLIEGDLNPDNSDVDKLFIQLVQTYNQLFEENPINASGVDAKAILSARLSKSRRLENLIAQLPGEKKNGLFGNLIALSLGLTPNFKSNFDLAEDAKLQLSKDTYDDDLDNLLAQIGDQYADLFLAAKNLSDAILLSDILRVNTEITKAPLSASMIKRYDEHHQDLTLLKALVRQQLPEKYKEIFFDQSKNGYAGYIDGGASQEEFYKFIKPILEKMDGTEELLVKLNREDLLRKQRTFDNGSIPHQIHLGELHAILRRQEDFYPFLKDNREKIEKILTFRIPYYVGPLARGNSRFAWMTRKSEETITPWNFEEVVDKGASAQSFIERMTNFDKNLPNEKVLPKHSLLYEYFTVYNELTKVKYVTEGMRKPAFLSGEQKKAIVDLLFKTNRKVTVKQLKEDYFKKIECFDSVEISGVEDRFNASLGTYHDLLKIIKDKDFLDNEENEDILEDIVLTLTLFEDREMIEERLKTYAHLFDDKVMKQLKRRRYTGWGRLSRKLINGIRDKQSGKTILDFLKSDGFANRNFMQLIHDDSLTFKEDIQKAQVSGQGDSLHEHIANLAGSPAIKKGILQTVKVVDELVKVMGRHKPENIVIEMARENQTTQKGQKNSRERMKRIEEGIKELGSQILKEHPVENTQLQNEKLYLYYLQNGRDMYVDQELDINRLSDYDVDHIVPQSFLKDDSIDNKVLTRSDKNRGKSDNVPSEEVVKKMKNYWRQLLNAKLITQRKFDNLTKAERGGLSELDKAGFIKRQLVETRQITKHVAQILDSRMNTKYDENDKLIREVKVITLKSKLVSDFRKDFQFYKVREINNYHHAHDAYLNAVVGTALIKKYPKLESEFVYGDYKVYDVRKMIAKSEQEIGKATAKYFFYSNIMNFFKTEITLANGEIRKRPLIETNGETGEIVWDKGRDFATVRKVLSMPQVNIVKKTEVQTGGFSKESILPKRNSDKLIARKKDWDPKKYGGFDSPTVAYSVLVVAKVEKGKSKKLKSVKELLGITIMERSSFEKNPIDFLEAKGYKEVKKDLIIKLPKYSLFELENGRKRMLASAGELQKGNELALPSKYVNFLYLASHYEKLKGSMNHRVEITEGILADECAALLCYFFRMPRQVFNAQKKAQSSTDGSSGSETPGTSESATPESSGSEVEFSHEYWMRHALTLAKRARDEREVPVGAVLVLNNRVIGEGWNRAIGLHDPTAHAEIMALRQGGLVMQNYRLIDATLYVTFEPCVMCAGAMIHSRIGRVVFGVRNAKTGAAGSLMDVLHYPGPEDNEQKQLFVEQHKHYLDEIIEQISEFSKRVILADANLDKVLSAYNKHRDKPIREQAENIIHLFTLTNLGAPAAFKYFDTTIDRKRYTSTKEVLDATLIHQSITGLYETRIDLSQLGGD

SEQ ID NO: 158 - protein, 1554 aa, Artificial Sequence
  Description of Artificial Sequence: Synthetic polypeptide
MDKKYSIGLAIGTNSVGWAVITDEYKVPSKKFKVLGNTDRHSIKKNLIGALLFDSGETAEATRLKRTARRRYTRRKNRICYLQEIFSNEMAKVDDSFFHRLEESFLVEEDKKHERHPIFGNIVDEVAYHEKYPTIYHLRKKLVDSTDKADLRLIYLALAHMIKFRGHFLIEGDLNPDNSDVDKLFIQLVQTYNQLFEENPINASGVDAKAILSARLSKSRRLENLIAQLPGEKKNGLFGNLIALSLGLTPNFKSNFDLAEDAKLQLSKDTYDDDLDNLLAQIGDQYADLFLAAKNLSDAILLSDILRVNTEITKAPLSASMIKRYDEHHQDLTLLKALVRQQLPEKYKEIFFDQSKNGYAGYIDGGASQEEFYKFIKPILEKMDGTEELLVKLNREDLLRKQRTFDNGSIPHQIHLGELHAILRRQEDFYPFLKDNREKIEKILTFRIPYYVGPLARGNSRFAWMTRKSEETITPWNFEEVVDKGASAQSFIERMTNFDKNLPNEKVLPKHSLLYEYFTVYNELTKVKYVTEGMRKPAFLSGEQKKAIVDLLFKTNRKVTVKQLKEDYFKKIECFDSVEISGVEDRFNASLGTYHDLLKIIKDKDFLDNEENEDILEDIVLTLTLFEDREMIEERLKTYAHLFDDKVMKQLKRRRYTGWGRLSRKLINGIRDKQSGKTILDFLKSDGFANRNFMQLIHDDSLTFKEDIQKAQVSGQGDSLHEHIANLAGSPAIKKGILQTVKVVDELVKVMGRHKPENIVIEMARENQTTQKGQKNSRERMKRIEEGIKELGSQILKEHPVENTQLQNEKLYLYYLQNGRDMYVDQELDINRLSDYDVDHIVPQSFLKDDSIDNKVLTRSDKNRGKSDNVPSEEVVKKMKNYWRQLLNAKLITQRKFDNLTKAERGGLSELDKAGFIKRQLVETRQITKHVAQILDSRMNTKYDENDKLIREVKVITLKSKLVSDFRKDFQFYKVREINNYHHAHDAYLNAVVGTALIKKYPKLESEFVYGDYKVYDVRKMIAKSEQEIGKATAKYFFYSNIMNFFKTEITLAMNHRVEITEGILADECAALLCYFFRMPRQVFNAQKKAQSSTDGSSGSETPGTSESATPESSGSEVEFSHEYWMRHALTLAKRARDEREVPVGAVLVLNNRVIGEGWNRAIGLHDPTAHAEIMALRQGGLVMQNYRLIDATLYVTFEPCVMCAGAMIHSRIGRVVFGVRNAKTGAAGSLMDVLHYPGNGEIRKRPLIETNGETGEIVWDKGRDFATVRKVLSMPQVNIVKKTEVQTGGFSKESILPKRNSDKLIARKKDWDPKKYGGFDSPTVAYSVLVVAKVEKGKSKKLKSVKELLGITIMERSSFEKNPIDFLEAKGYKEVKKDLIIKLPKYSLFELENGRKRMLASAGELQKGNELALPSKYVNFLYLASHYEKLKGSPEDNEQKQLFVEQHKHYLDEIIEQISEFSKRVILADANLDKVLSAYNKHRDKPIREQAENIIHLFTLTNLGAPAAFKYFDTTIDRKRYTSTKEVLDATLIHQSITGLYETRIDLSQLGGD

SEQ ID NO: 159 - protein, 1554 aa, Artificial Sequence
  Description of Artificial Sequence: Synthetic polypeptide
MDKKYSIGLAIGTNSVGWAVITDEYKVPSKKFKVLGNTDRHSIKKNLIGALLFDSGETAEATRLKRTARRRYTRRKNRICYLQEIFSNEMAKVDDSFFHRLEESFLVEEDKKHERHPIFGNIVDEVAYHEKYPTIYHLRKKLVDSTDKADLRLIYLALAHMIKFRGHFLIEGDLNPDNSDVDKLFIQLVQTYNQLFEENPINASGVDAKAILSARLSKSRRLENLIAQLPGEKKNGLFGNLIALSLGLTPNFKSNFDLAEDAKLQLSKDTYDDDLDNLLAQIGDQYADLFLAAKNLSDAILLSDILRVNTEITKAPLSASMIKRYDEHHQDLTLLKALVRQQLPEKYKEIFFDQSKNGYAGYIDGGASQEEFYKFIKPILEKMDGTEELLVKLNREDLLRKQRTFDNGSIPHQIHLGELHAILRRQEDFYPFLKDNREKIEKILTFRIPYYVGPLARGNSRFAWMTRKSEETITPWNFEEVVDKGASAQSFIERMTNFDKNLPNEKVLPKHSLLYEYFTVYNELTKVKYVTEGMRKPAFLSGEQKKAIVDLLFKTNRKVTVKQLKEDYFKKIECFDSVEISGVEDRFNASLGTYHDLLKIIKDKDFLDNEENEDILEDIVLTLTLFEDREMIEERLKTYAHLFDDKVMKQLKRRRYTGWGRLSRKLINGIRDKQSGKTILDFLKSDGFANRNFMQLIHDDSLTFKEDIQKAQVSGQGDSLHEHIANLAGSPAIKKGILQTVKVVDELVKVMGRHKPENIVIEMARENQTTQKGQKNSRERMKRIEEGIKELGSQILKEHPVENTQLQNEKLYLYYLQNGRDMYVDQELDINRLSDYDVDHIVPQSFLKDDSIDNKVLTRSDKNRGKSDNVPSEEVVKKMKNYWRQLLNAKLITQRKFDNLTKAERGGLSELDKAGFIKRQLVETRQITKHVAQILDSRMNTKYDENDKLIREVKVITLKSKLVSDFRKDFQFYKVREINNYHHAHDAYLNAVVGTALIKKYPKLESEFVYGDYKVYDVRKMIAKSEQEIGKATAKYFFYSMNHRVEITEGILADECAALLCYFFRMPRQVFNAQKKAQSSTDGSSGSETPGTSESATPESSGSEVEFSHEYWMRHALTLAKRARDEREVPVGAVLVLNNRVIGEGWNRAIGLHDPTAHAEIMALRQGGLVMQNYRLIDATLYVTFEPCVMCAGAMIHSRIGRVVFGVRNAKTGAAGSLMDVLHYPGNIMNFFKTEITLANGEIRKRPLIETNGETGEIVWDKGRDFATVRKVLSMPQVNIVKKTEVQTGGFSKESILPKRNSDKLIARKKDWDPKKYGGFDSPTVAYSVLVVAKVEKGKSKKLKSVKELLGITIMERSSFEKNPIDFLEAKGYKEVKKDLIIKLPKYSLFELENGRKRMLASAGELQKGNELALPSKYVNFLYLASHYEKLKGSPEDNEQKQLFVEQHKHYLDEIIEQISEFSKRVILADANLDKVLSAYNKHRDKPIREQAENIIHLFTLTNLGAPAAFKYFDTTIDRKRYTSTKEVLDATLIHQSITGLYETRIDLSQLGGD

SEQ ID NO: 160 - protein, 1554 aa, Artificial Sequence
  Description of Artificial Sequence: Synthetic polypeptide
MDKKYSIGLAIGTNSVGWAVITDEYKVPSKKFKVLGNTDRHSIKKNLIGALLFDSGETAEATRLKRTARRRYTRRKNRICYLQEIFSNEMAKVDDSFFHRLEESFLVEEDKKHERHPIFGNIVDEVAYHEKYPTIYHLRKKLVDSTDKADLRLIYLALAHMIKFRGHFLIEGDLNPDNSDVDKLFIQLVQTYNQLFEENPINASGVDAKAILSARLSKSRRLENLIAQLPGEKKNGLFGNLIALSLGLTPNFKSNFDLAEDAKLQLSKDTYDDDLDNLLAQIGDQYADLFLAAKNLSDAILLSDILRVNTEITKAPLSASMIKRYDEHHQDLTLLKALVRQQLPEKYKEIFFDQSKNGYAGYIDGGASQEEFYKFIKPILEKMDGTEELLVKLNREDLLRKQRTFDNGSIPHQIHLGELHAILRRQEDFYPFLKDNREKIEKILTFRIPYYVGPLARGNSRFAWMTRKSEETITPWNFEEVVDKGASAQSFIERMTNFDKNLPNEKVLPKHSLLYEYFTVYNELTKVKYVTEGMRKPAFLSGEQKKAIVDLLFKTNRKVTVKQLKEDYFKKIECFDSVEISGVEDRFNASLGTYHDLLKIIKDKDFLDNEENEDILEDIVLTLTLFEDREMIEERLKTYAHLFDDKVMKQLKRRRYTGWGRLSRKLINGIRDKQSGKTILDFLKSDGFANRNFMQLIHDDSLTFKEDIQKAQVSGQGDSLHEHIANLAGSPAIKKGILQTVKVVDELVKVMGRHKPENIVIEMARENQTTQKGQKNSRERMKRIEEGIKELGSQILKEHPVENTQLQNEKLYLYYLQNGRDMYVDQELDINRLSDYDVDHIVPQSFLKDDSIDNKVLTRSDKNRGKSDNVPSEEVVKKMKNYWRQLLNAKLITQRKFDNLTKAERGGLSELDKAGFIKRQLVETRQITKHVAQILDSRMNTKYDENDKLIREVKVITLKSKLVSDFRKDFQFYKVREINNYHHAHDAYLNAVVGTALIKKYPKLESEFVYGDYKVYDVRKMIAKSEQEIGKATAKYFFYSNIMNFFKTEITLANGEIRKRPLIETNGETGEIVWDKGRDFATVRKVLSMPQVNIVKKTEVQTGGFSKESILPKRNSDKLIARKKDWDPKKYGGFDSPTVAYSVLVVAKVEKGKSKKLKSVKELLGITIMERSSFEKNPIDFLEAKGYKEVKKDLIIKLPKYSLFELENGRKRMLASAGELQKGNELALPSKYVNFLYLASHYEKLKGSPEDNEQKQLFVEQHKHYLDEIIEQISEFSKRVILADANLDKVLSAYNKHRMNHRVEITEGILADECAALLCYFFRMPRQVFNAQKKAQSSTDGSSGSETPGTSESATPESSGSEVEFSHEYWMRHALTLAKRARDEREVPVGAVLVLNNRVIGEGWNRAIGLHDPTAHAEIMALRQGGLVMQNYRLIDATLYVTFEPCVMCAGAMIHSRIGRVVFGVRNAKTGAAGSLMDVLHYPGDKPIREQAENIIHLFTLTNLGAPAAFKYFDTTIDRKRYTSTKEVLDATLIHQSITGLYETRIDLSQLGGD

SEQ ID NO: 161 - protein, 1454 aa, Artificial Sequence
  Description of Artificial Sequence: Synthetic polypeptide
MDKKYSIGLAIGTNSVGWAVITDEYKVPSKKFKVLGNTDRHSIKKNLIGALLFDSGETAEATRLKRTARRRYTRRKNRICYLQEIFSNEMAKVDDSFFHRLEESFLVEEDKKHERHPIFGNIVDEVAYHEKYPTIYHLRKKLVDSTDKADLRLIYLALAHMIKFRGHFLIEGDLNPDNSDVDKLFIQLVQTYNQLFEENPINASGVDAKAILSARLSKSRRLENLIAQLPGEKKNGLFGNLIALSLGLTPNFKSNFDLAEDAKLQLSKDTYDDDLDNLLAQIGDQYADLFLAAKNLSDAILLSDILRVNTEITKAPLSASMIKRYDEHHQDLTLLKALVRQQLPEKYKEIFFDQSKNGYAGYIDGGASQEEFYKFIKPILEKMDGTEELLVKLNREDLLRKQRTFDNGSIPHQIHLGELHAILRRQEDFYPFLKDNREKIEKILTFRIPYYVGPLARGNSRFAWMTRKSEETITPWNFEEVVDKGASAQSFIERMTNFDKNLPNEKVLPKHSLLYEYFTVYNELTKVKYVTEGMRKPAFLSGEQKKAIVDLLFKTNRKVTVKQLKEDYFKKIECFDSVEISGVEDRFNASLGTYHDLLKIIKDKDFLDNEENEDILEDIVLTLTLFEDREMIEERLKTYAHLFDDKVMKQLKRRRYTGWGRLSRKLINGIRDKQSGKTILDFLKSDGFANRNFMQLIHDDSLTFKEDIQKAQVSGQGDSLHEHIANLAGSPAIKKGILQTVKVVDELVKVMGRHKPENIVIEMARENQTTQKGQKNSRERMKRIEEGIKELGSEVEFSHEYWMRHALTLAKRARDEREVPVGAVLVLNNRVIGEGWNRAIGLHDPTAHAEIMALRQGGLVMQNYRLIDATLYVTFEPCVMCAGAMIHSRIGRVVFGVRNAKTGAAGSLMDVLHYPGMNHRVEITEGILADECAALLCYFFRMPRQVFNAQKKAQSSTDEEVVKKMKNYWRQLLNAKLITQRKFDNLTKAERGGLSELDKAGFIKRQLVETRQITKHVAQILDSRMNTKYDENDKLIREVKVITLKSKLVSDFRKDFQFYKVREINNYHHAHDAYLNAVVGTALIKKYPKLESEFVYGDYKVYDVRKMIAKSEQEIGKATAKYFFYSNIMNFFKTEITLANGEIRKRPLIETNGETGEIVWDKGRDFATVRKVLSMPQVNIVKKTEVQTGGFSKESILPKRNSDKLIARKKDWDPKKYGGFDSPTVAYSVLVVAKVEKGKSKKLKSVKELLGITIMERSSFEKNPIDFLEAKGYKEVKKDLIIKLPKYSLFELENGRKRMLASAGELQKGNELALPSKYVNFLYLASHYEKLKGSPEDNEQKQLFVEQHKHYLDEIIEQISEFSKRVILADANLDKVLSAYNKHRDKPIREQAENIIHLFTLTNLGAPAAFKYFDTTIDRKRYTSTKEVLDATLIHQSITGLYETRIDLSQLGGD

SEQ ID NO: 162 - protein, 1420 aa, Artificial Sequence
  Description of Artificial Sequence: Synthetic polypeptide
MDKKYSIGLAIGTNSVGWAVITDEYKVPSKKFKVLGNTDRHSIKKNLIGALLFDSGETAEATRLKRTARRRYTRRKNRICYLQEIFSNEMAKVDDSFFHRLEESFLVEEDKKHERHPIFGNIVDEVAYHEKYPTIYHLRKKLVDSTDKADLRLIYLALAHMIKFRGHFLIEGDLNPDNSDVDKLFIQLVQTYNQLFEENPINASGVDAKAILSARLSKSRRLENLIAQLPGEKKNGLFGNLIALSLGLTPNFKSNFDLAEDAKLQLSKDTYDDDLDNLLAQIGDQYADLFLAAKNLSDAILLSDILRVNTEITKAPLSASMIKRYDEHHQDLTLLKALVRQQLPEKYKEIFFDQSKNGYAGYIDGGASQEEFYKFIKPILEKMDGTEELLVKLNREDLLRKQRTFDNGSIPHQIHLGELHAILRRQEDFYPFLKDNREKIEKILTFRIPYYVGPLARGNSRFAWMTRKSEETITPWNFEEVVDKGASAQSFIERMTNFDKNLPNEKVLPKHSLLYEYFTVYNELTKVKYVTEGMRKPAFLSGEQKKAIVDLLFKTNRKVTVKQLKEDYFKKIECFDSVEISGVEDRFNASLGTYHDLLKIIKDKDFLDNEENEDILEDIVLTLTLFEDREMIEERLKTYAHLFDDKVMKQLKRRRYTGWGRLSRKLINGIRDKQSGKTILDFLKSDGFANRNFMQLIHDDSLTFKEDIQKAQVSGQGDSLHEHIANLAGSPAIKKGILQTVKVVDELVKVMGRHKPENIVIEMARENQTTQKGQKNSRERMKRIEEGIKELGSEVEFSHEYWMRHALTLAKRARDEREVPVGAVLVLNNRVIGEGWNRAIGLHDPTAHAEIMALRQGGLVMQNYRLIDATLYVTFEPCVMCAGAMIHSRIGRVVFGVRNAKTGAAGSLMDVLHYPGMNHRVEITEGILADECAALLCYFFRMPRQVFNAQKKAQSSTDGLSELDKAGFIKRQLVETRQITKHVAQILDSRMNTKYDENDKLIREVKVITLKSKLVSDFRKDFQFYKVREINNYHHAHDAYLNAVVGTALIKKYPKLESEFVYGDYKVYDVRKMIAKSEQEIGKATAKYFFYSNIMNFFKTEITLANGEIRKRPLIETNGETGEIVWDKGRDFATVRKVLSMPQVNIVKKTEVQTGGFSKESILPKRNSDKLIARKKDWDPKKYGGFDSPTVAYSVLVVAKVEKGKSKKLKSVKELLGITIMERSSFEKNPIDFLEAKGYKEVKKDLIIKLPKYSLFELENGRKRMLASAGELQKGNELALPSKYVNFLYLASHYEKLKGSPEDNEQKQLFVEQHKHYLDEIIEQISEFSKRVILADANLDKVLSAYNKHRDKPIREQAENIIHLFTLTNLGAPAAFKYFDTTIDRKRYTSTKEVLDATLIHQSITGLYETRIDLSQLGGD

SEQ ID NO: 163 - protein, 1554 aa, Artificial Sequence
  Description of Artificial Sequence: Synthetic polypeptide
MDKKYSIGLAIGTNSVGWAVITDEYKVPSKKFKVLGNTDRHSIKKNLIGALLFDSGETAEATRLKRTARRRYTRRKNRICYLQEIFSNEMAKVDDSFFHRLEESFLVEEDKKHERHPIFGNIVDEVAYHEKYPTIYHLRKKLVDSTDKADLRLIYLALAHMIKFRGHFLIEGDLNPDNSDVDKLFIQLVQTYNQLFEENPINASGVDAKAILSARLSKSRRLENLIAQLPGEKKNGLFGNLIALSLGLTPNFKSNFDLAEDAKLQLSKDTYDDDLDNLLAQIGDQYADLFLAAKNLSDAILLSDILRVNTEITKAPLSASMIKRYDEHHQDLTLLKALVRQQLPEKYKEIFFDQSKNGYAGYIDGGASQEEFYKFIKPILEKMDGTEELLVKLNREDLLRKQRTFDNGSIPHQIHLGELHAILRRQEDFYPFLKDNREKIEKILTFRIPYYVGPLARGNSRFAWMTRKSEETITPWNFEEVVDKGASAQSFIERMTNFDKNLPNEKVLPKHSLLYEYFTVYNELTKVKYVTEGMRKPAFLSGEQKKAIVDLLFKTNRKVTVKQLKEDYFKKIECFDSVEISGVEDRFNASLGTYHDLLKIIKDKDFLDNEENEDILEDIVLTLTLFEDREMIEERLKTYAHLFDDKVMKQLKRRRYTGWGRLSRKLINGIRDKQSGKTILDFLKSDGFANRNFMQLIHDDSLTFKEDIQKAQVSGQGDSLHEHIANLAGSPAIKKGILQTVKVVDELVKVMGRHKPENIVIEMARENQTTQKGQKNSRERMKRIEEGIKELGSQILKEHPVENTQLQNEKLYLYYLQNGRDMYVDQELDINRLSDYDVDHIVPQSFLKDDSIDNKVLTRSDKNRGKSDNVPSEEVVKKMKNYWRQLLNAKLITQRKFDNLTKAERGGLSELDKAGFIKRQLVETRQITKHVAQILDSRMNTKYDENDKLIREVKVITLKSKLVSDFRKDFQFYKVREINNYHHAHDAYLNAVVGTALIKKYPKTAHAEIMALRQGGLVMQNYRLIDATLYVTFEPCVMCAGAMIHSRIGRVVFGVRNAKTGAAGSLMDVLHYPGMNHRVEITEGILADECAALLCYFFRMPRQVFNAQKKAQSSTDGSSGSETPGTSESATPESSGSEVEFSHEYWMRHALTLAKRARDEREVPVGAVLVLNNRVIGEGWNRAIGLHDPLESEFVYGDYKVYDVRKMIAKSEQEIGKATAKYFFYSNIMNFFKTEITLANGEIRKRPLIETNGETGEIVWDKGRDFATVRKVLSMPQVNIVKKTEVQTGGFSKESILPKRNSDKLIARKKDWDPKKYGGFDSPTVAYSVLVVAKVEKGKSKKLKSVKELLGITIMERSSFEKNPIDFLEAKGYKEVKKDLIIKLPKYSLFELENGRKRMLASAGELQKGNELALPSKYVNFLYLASHYEKLKGSPEDNEQKQLFVEQHKHYLDEIIEQISEFSKRVILADANLDKVLSAYNKHRDKPIREQAENIIHLFTLTNLGAPAAFKYFDTTIDRKRYTSTKEVLDATLIHQSITGLYETRIDLSQLGGD

SEQ ID NO: 164 - protein, 1554 aa, Artificial Sequence
  Description of Artificial Sequence: Synthetic polypeptide
MDKKYSIGLAIGTNSVGWAVITDEYKVPSKKFKVLGNTDRHSIKKNLIGALLFDSGETAEATRLKRTARRRYTRRKNRICYLQEIFSNEMAKVDDSFFHRLEESFLVEEDKKHERHPIFGNIVDEVAYHEKYPTIYHLRKKLVDSTDKADLRLIYLALAHMIKFRGHFLIEGDLNPDNSDVDKLFIQLVQTYNQLFEENPINASGVDAKAILSARLSKSRRLENLIAQLPGEKKNGLFGNLIALSLGLTPNFKSNFDLAEDAKLQLSKDTYDDDLDNLLAQIGDQYADLFLAAKNLSDAILLSDILRVNTEITKAPLSASMIKRYDEHHQDLTLLKALVRQQLPEKYKEIFFDQSKNGYAGYIDGGASQEEFYKFIKPILEKMDGTEELLVKLNREDLLRKQRTFDNGSIPHQIHLGELHAILRRQEDFYPFLKDNREKIEKILTFRIPYYVGPLARGNSRFAWMTRKSEETITPWNFEEVVDKGASAQSFIERMTNFDKNLPNEKVLPKHSLLYEYFTVYNELTKVKYVTEGMRKPAFLSGEQKKAIVDLLFKTNRKVTVKQLKEDYFKKIECFDSVEISGVEDRFNASLGTYHDLLKIIKDKDFLDNEENEDILEDIVLTLTLFEDREMIEERLKTYAHLFDDKVMKQLKRRRYTGWGRLSRKLINGIRDKQSGKTILDFLKSDGFANRNFMQLIHDDSLTFKEDIQKAQVSGQGDSLHEHIANLAGSPAIKKGILQTVKVVDELVKVMGRHKPENIVIEMARENQTTQKGQKNSRERMKRIEEGIKELGSQILKEHPVENTQLQNEKLYLYYLQNGRDMYVDQELDINRLSDYDVDHIVPQSFLKDDSIDNKVLTRSDKNRGKSDNVPSEEVVKKMKNYWRQLLNAKLITQRKFDNLTKAERGGLSELDKAGFIKRQLVETRQITKHVAQILDSRMNTKYDENDKLIREVKVITLKSKLVSDFRKDFQFYKVREINNYHHAHDAYLNAVVGTALIKKYPKLESEFVYGDYKVTAHAEIMALRQGGLVMQNYRLIDATLYVTFEPCVMCAGAMIHSRIGRVVFGVRNAKTGAAGSLMDVLHYPGMNHRVEITEGILADECAALLCYFFRMPRQVFNAQKKAQSSTDGSSGSETPGTSESATPESSGSEVEFSHEYWMRHALTLAKRARDEREVPVGAVLVLNNRVIGEGWNRAIGLHDPYDVRKMIAKSEQEIGKATAKYFFYSNIMNFFKTEITLANGEIRKRPLIETNGETGEIVWDKGRDFATVRKVLSMPQVNIVKKTEVQTGGFSKESILPKRNSDKLIARKKDWDPKKYGGFDSPTVAYSVLVVAKVEKGKSKKLKSVKELLGITIMERSSFEKNPIDFLEAKGYKEVKKDLIIKLPKYSLFELENGRKRMLASAGELQKGNELALPSKYVNFLYLASHYEKLKGSPEDNEQKQLFVEQHKHYLDEIIEQISEFSKRVILADANLDKVLSAYNKHRDKPIREQAENIIHLFTLTNLGAPAAFKYFDTTIDRKRYTSTKEVLDATLIHQSITGLYETRIDLSQLGGD

SEQ ID NO: 165 - protein, 1554 aa, Artificial Sequence
  Description of Artificial Sequence: Synthetic polypeptide
MDKKYSIGLAIGTNSVGWAVITDEYKVPSKKFKVLGNTDRHSIKKNLIGALLFDSGETAEATRLKRTARRRYTRRKNRICYLQEIFSNEMAKVDDSFFHRLEESFLVEEDKKHERHPIFGNIVDEVAYHEKYPTIYHLRKKLVDSTDKADLRLIYLALAHMIKFRGHFLIEGDLNPDNSDVDKLFIQLVQTYNQLFEENPINASGVDAKAILSARLSKSRRLENLIAQLPGEKKNGLFGNLIALSLGLTPNFKSNFDLAEDAKLQLSKDTYDDDLDNLLAQIGDQYADLFLAAKNLSDAILLSDILRVNTEITKAPLSASMIKRYDEHHQDLTLLKALVRQQLPEKYKEIFFDQSKNGYAGYIDGGASQEEFYKFIKPILEKMDGTEELLVKLNREDLLRKQRTFDNGSIPHQIHLGELHAILRRQEDFYPFLKDNREKIEKILTFRIPYYVGPLARGNSRFAWMTRKSEETITPWNFEEVVDKGASAQSFIERMTNFDKNLPNEKVLPKHSLLYEYFTVYNELTKVKYVTEGMRKPAFLSGEQKKAIVDLLFKTNRKVTVKQLKEDYFKKIECFDSVEISGVEDRFNASLGTYHDLLKIIKDKDFLDNEENEDILEDIVLTLTLFEDREMIEERLKTYAHLFDDKVMKQLKRRRYTGWGRLSRKLINGIRDKQSGKTILDFLKSDGFANRNFMQLIHDDSLTFKEDIQKAQVSGQGDSLHEHIANLAGSPAIKKGILQTVKVVDELVKVMGRHKPENIVIEMARENQTTQKGQKNSRERMKRIEEGIKELGSQILKEHPVENTQLQNEKLYLYYLQNGRDMYVDQELDINRLSDYDVDHIVPQSFLKDDSIDNKVLTRSDKNRGKSDNVPSEEVVKKMKNYWRQLLNAKLITQRKFDNLTKAERGGLSELDKAGFIKRQLVETRQITKHVAQILDSRMNTKYDENDKLIREVKVITLKSKLVSDFRKDFQFYKVREINNYHHAHDAYLNAVVGTALIKKYPKLESEFVYGDYKVYDVRKMITAHAEIMALRQGGLVMQNYRLIDATLYVTFEPCVMCAGAMIHSRIGRVVFGVRNAKTGAAGSLMDVLHYPGMNHRVEITEGILADECAALLCYFFRMPRQVFNAQKKAQSSTDGSSGSETPGTSESATPESSGSEVEFSHEYWMRHALTLAKRARDEREVPVGAVLVLNNRVIGEGWNRAIGLHDPAKSEQEIGKATAKYFFYSNIMNFFKTEITLANGEIRKRPLIETNGETGEIVWDKGRDFATVRKVLSMPQVNIVKKTEVQTGGFSKESILPKRNSDKLIARKKDWDPKKYGGFDSPTVAYSVLVVAKVEKGKSKKLKSVKELLGITIMERSSFEKNPIDFLEAKGYKEVKKDLIIKLPKYSLFELENGRKRMLASAGELQKGNELALPSKYVNFLYLASHYEKLKGSPEDNEQKQLFVEQHKHYLDEIIEQISEFSKRVILADANLDKVLSAYNKHRDKPIREQAENIIHLFTLTNLGAPAAFKYFDTTIDRKRYTSTKEVLDATLIHQSITGLYETRIDLSQLGGD

SEQ ID NO: 166 - protein, 1554 aa, Artificial Sequence
  Description of Artificial Sequence: Synthetic polypeptide
MDKKYSIGLAIGTNSVGWAVITDEYKVPSKKFKVLGNTDRHSIKKNLIGALLFDSGETAEATRLKRTARRRYTRRKNRICYLQEIFSNEMAKVDDSFFHRLEESFLVEEDKKHERHPIFGNIVDEVAYHEKYPTIYHLRKKLVDSTDKADLRLIYLALAHMIKFRGHFLIEGDLNPDNSDVDKLFIQLVQTYNQLFEENPINASGVDAKAILSARLSKSRRLENLIAQLPGEKKNGLFGNLIALSLGLTPNFKSNFDLAEDAKLQLSKDTYDDDLDNLLAQIGDQYADLFLAAKNLSDAILLSDILRVNTEITKAPLSASMIKRYDEHHQDLTLLKALVRQQLPEKYKEIFFDQSKNGYAGYIDGGASQEEFYKFIKPILEKMDGTEELLVKLNREDLLRKQRTFDNGSIPHQIHLGELHAILRRQEDFYPFLKDNREKIEKILTFRIPYYVGPLARGNSRFAWMTRKSEETITPWNFEEVVDKGASAQSFIERMTNFDKNLPNEKVLPKHSLLYEYFTVYNELTKVKYVTEGMRKPAFLSGEQKKAIVDLLFKTNRKVTVKQLKEDYFKKIECFDSVEISGVEDRFNASLGTYHDLLKIIKDKDFLDNEENEDILEDIVLTLTLFEDREMIEERLKTYAHLFDDKVMKQLKRRRYTGWGRLSRKLINGIRDKQSGKTILDFLKSDGFANRNFMQLIHDDSLTFKEDIQKAQVSGQGDSLHEHIANLAGSPAIKKGILQTVKVVDELVKVMGRHKPENIVIEMARENQTTQKGQKNSRERMKRIEEGIKELGSQILKEHPVENTQLQNEKLYLYYLQNGRDMYVDQELDINRLSDYDVDHIVPQSFLKDDSIDNKVLTRSDKNRGKSDNVPSEEVVKKMKNYWRQLLNAKLITQRKFDNLTKAERGGLSELDKAGFIKRQLVETRQITKHVAQILDSRMNTKYDENDKLIREVKVITLKSKLVSDFRKDFQFYKVREINNYHHAHDAYLNAVVGTALIKKYPKLESEFVYGDYKVYDVRKMIAKSEQEITAHAEIMALRQGGLVMQNYRLIDATLYVTFEPCVMCAGAMIHSRIGRVVFGVRNAKTGAAGSLMDVLHYPGMNHRVEITEGILADECAALLCYFFRMPRQVFNAQKKAQSSTDGSSGSETPGTSESATPESSGSEVEFSHEYWMRHALTLAKRARDEREVPVGAVLVLNNRVIGEGWNRAIGLHDPGKATAKYFFYSNIMNFFKTEITLANGEIRKRPLIETNGETGEIVWDKGRDFATVRKVLSMPQVNIVKKTEVQTGGFSKESILPKRNSDKLIARKKDWDPKKYGGFDSPTVAYSVLVVAKVEKGKSKKLKSVKELLGITIMERSSFEKNPIDFLEAKGYKEVKKDLIIKLPKYSLFELENGRKRMLASAGELQKGNELALPSKYVNFLYLASHYEKLKGSPEDNEQKQLFVEQHKHYLDEIIEQISEFSKRVILADANLDKVLSAYNKHRDKPIREQAENIIHLFTLTNLGAPAAFKYFDTTIDRKRYTSTKEVLDATLIHQSITGLYETRIDLSQLGGD

SEQ ID NO: 167 - protein, 1554 aa, Artificial Sequence
  Description of Artificial Sequence: Synthetic polypeptide
MDKKYSIGLAIGTNSVGWAVITDEYKVPSKKFKVLGNTDRHSIKKNLIGALLFDSGETAEATRLKRTARRRYTRRKNRICYLQEIFSNEMAKVDDSFFHRLEESFLVEEDKKHERHPIFGNIVDEVAYHEKYPTIYHLRKKLVDSTDKADLRLIYLALAHMIKFRGHFLIEGDLNPDNSDVDKLFIQLVQTYNQLFEENPINASGVDAKAILSARLSKSRRLENLIAQLPGEKKNGLFGNLIALSLGLTPNFKSNFDLAEDAKLQLSKDTYDDDLDNLLAQIGDQYADLFLAAKNLSDAILLSDILRVNTEITKAPLSASMIKRYDEHHQDLTLLKALVRQQLPEKYKEIFFDQSKNGYAGYIDGGASQEEFYKFIKPILEKMDGTEELLVKLNREDLLRKQRTFDNGSIPHQIHLGELHAILRRQEDFYPFLKDNREKIEKILTFRIPYYVGPLARGNSRFAWMTRKSEETITPWNFEEVVDKGASAQSFIERMTNFDKNLPNEKVLPKHSLLYEYFTVYNELTKVKYVTEGMRKPAFLSGEQKKAIVDLLFKTNRKVTVKQLKEDYFKKIECFDSVEISGVEDRFNASLGTYHDLLKIIKDKDFLDNEENEDILEDIVLTLTLFEDREMIEERLKTYAHLFDDKVMKQLKRRRYTGWGRLSRKLINGIRDKQSGKTILDFLKSDGFANRNFMQLIHDDSLTFKEDIQKAQVSGQGDSLHEHIANLAGSPAIKKGILQTVKVVDELVKVMGRHKPENIVIEMARENQTTQKGQKNSRERMKRIEEGIKELGSQILKEHPVENTQLQNEKLYLYYLQNGRDMYVDQELDINRLSDYDVDHIVPQSFLKDDSIDNKVLTRSDKNRGKSDNVPSEEVVKKMKNYWRQLLNAKLITQRKFDNLTKAERGGLSELDKAGFIKRQLVETRQITKHVAQILDSRMNTKYDENDKLIREVKVITLKSKLVSDFRKDFQFYKVREINNYHHAHDAYLNAVVGTALIKKYPKLESEFVYGDYKVYDVRKMIAKSEQEIGKATAKYFFYSTAHAEIMALRQGGLVMQNYRLIDATLYVTFEPCVMCAGAMIHSRIGRVVFGVRNAKTGAAGSLMDVLHYPGMNHRVEITEGILADECAALLCYFFRMPRQVFNAQKKAQSSTDGSSGSETPGTSESATPESSGSEVEFSHEYWMRHALTLAKRARDEREVPVGAVLVLNNRVIGEGWNRAIGLHDPNIMNFFKTEITLANGEIRKRPLIETNGETGEIVWDKGRDFATVRKVLSMPQVNIVKKTEVQTGGFSKESILPKRNSDKLIARKKDWDPKKYGGFDSPTVAYSVLVVAKVEKGKSKKLKSVKELLGITIMERSSFEKNPIDFLEAKGYKEVKKDLIIKLPKYSLFELENGRKRMLASAGELQKGNELALPSKYVNFLYLASHYEKLKGSPEDNEQKQLFVEQHKHYLDEIIEQISEFSKRVILADANLDKVLSAYNKHRDKPIREQAENIIHLFTLTNLGAPAAFKYFDTTIDRKRYTSTKEVLDATLIHQSITGLYETRIDLSQLGGD

SEQ ID NO: 168 - protein, 1554 aa, Artificial Sequence
  Description of Artificial Sequence: Synthetic polypeptide
MDKKYSIGLAIGTNSVGWAVITDEYKVPSKKFKVLGNTDRHSIKKNLIGALLFDSGETAEATRLKRTARRRYTRRKNRICYLQEIFSNEMAKVDDSFFHRLEESFLVEEDKKHERHPIFGNIVDEVAYHEKYPTIYHLRKKLVDSTDKADLRLIYLALAHMIKFRGHFLIEGDLNPDNSDVDKLFIQLVQTYNQLFEENPINASGVDAKAILSARLSKSRRLENLIAQLPGEKKNGLFGNLIALSLGLTPNFKSNFDLAEDAKLQLSKDTYDDDLDNLLAQIGDQYADLFLAAKNLSDAILLSDILRVNTEITKAPLSASMIKRYDEHHQDLTLLKALVRQQLPEKYKEIFFDQSKNGYAGYIDGGASQEEFYKFIKPILEKMDGTEELLVKLNREDLLRKQRTFDNGSIPHQIHLGELHAILRRQEDFYPFLKDNREKIEKILTFRIPYYVGPLARGNSRFAWMTRKSEETITPWNFEEVVDKGASAQSFIERMTNFDKNLPNEKVLPKHSLLYEYFTVYNELTKVKYVTEGMRKPAFLSGEQKKAIVDLLFKTNRKVTVKQLKEDYFKKIECFDSVEISGVEDRFNASLGTYHDLLKIIKDKDFLDNEENEDILEDIVLTLTLFEDREMIEERLKTYAHLFDDKVMKQLKRRRYTGWGRLSRKLINGIRDKQSGKTILDFLKSDGFANRNFMQLIHDDSLTFKEDIQKAQVSGQGDSLHEHIANLAGSPAIKKGILQTVKVVDELVKVMGRHKPENIVIEMARENQTTQKGQKNSRERMKRIEEGIKELGSQILKEHPVENTQLQNEKLYLYYLQNGRDMYVDQELDINRLSDYDVDHIVPQSFLKDDSIDNKVLTRSDKNRGKSDNVPSEEVVKKMKNYWRQLLNAKLITQRKFDNLTKAERGGLSELDKAGFIKRQLVETRQITKHVAQILDSRMNTKYDENDKLIREVKVITLKSKLVSDFRKDFQFYKVREINNYHHAHDAYLNAVVGTALIKKYPKLESEFVYGDYKVYDVRKMIAKSEQEIGKATAKYFFYSNIMNFFKTEITLANTAHAEIMALRQGGLVMQNYRLIDATLYVTFEPCVMCAGAMIHSRIGRVVFGVRNAKTGAAGSLMDVLHYPGMNHRVEITEGILADECAALLCYFFRMPRQVFNAQKKAQSSTDGSSGSETPGTSESATPESSGSEVEFSHEYWMRHALTLAKRARDEREVPVGAVLVLNNRVIGEGWNRAIGLHDPGEIRKRPLIETNGETGEIVWDKGRDFATVRKVLSMPQVNIVKKTEVQTGGFSKESILPKRNSDKLIARKKDWDPKKYGGFDSPTVAYSVLVVAKVEKGKSKKLKSVKELLGITIMERSSFEKNPIDFLEAKGYKEVKKDLIIKLPKYSLFELENGRKRMLASAGELQKGNELALPSKYVNFLYLASHYEKLKGSPEDNEQKQLFVEQHKHYLDEIIEQISEFSKRVILADANLDKVLSAYNKHRDKPIREQAENIIHLFTLTNLGAPAAFKYFDTTIDRKRYTSTKEVLDATLIHQSITGLYETRIDLSQLGGD

SEQ ID NO: 169 - protein, 1554 aa, Artificial Sequence
  Description of Artificial Sequence: Synthetic polypeptide
MDKKYSIGLAIGTNSVGWAVITDEYKVPSKKFKVLGNTDRHSIKKNLIGALLFDSGETAEATRLKRTARRRYTRRKNRICYLQEIFSNEMAKVDDSFFHRLEESFLVEEDKKHERHPIFGNIVDEVAYHEKYPTIYHLRKKLVDSTDKADLRLIYLALAHMIKFRGHFLIEGDLNPDNSDVDKLFIQLVQTYNQLFEENPINASGVDAKAILSARLSKSRRLENLIAQLPGEKKNGLFGNLIALSLGLTPNFKSNFDLAEDAKLQLSKDTYDDDLDNLLAQIGDQYADLFLAAKNLSDAILLSDILRVNTEITKAPLSASMIKRYDEHHQDLTLLKALVRQQLPEKYKEIFFDQSKNGYAGYIDGGASQEEFYKFIKPILEKMDGTEELLVKLNREDLLRKQRTFDNGSIPHQIHLGELHAILRRQEDFYPFLKDNREKIEKILTFRIPYYVGPLARGNSRFAWMTRKSEETITPWNFEEVVDKGASAQSFIERMTNFDKNLPNEKVLPKHSLLYEYFTVYNELTKVKYVTEGMRKPAFLSGEQKKAIVDLLFKTNRKVTVKQLKEDYFKKIECFDSVEISGVEDRFNASLGTYHDLLKIIKDKDFLDNEENEDILEDIVLTLTLFEDREMIEERLKTYAHLFDDKVMKQLKRRRYTGWGRLSRKLINGIRDKQSGKTILDFLKSDGFANRNFMQLIHDDSLTFKEDIQKAQVSGQGDSLHEHIANLAGSPAIKKGILQTVKVVDELVKVMGRHKPENIVIEMARENQTTQKGQKNSRERMKRIEEGIKELGSQILKEHPVENTQLQNEKLYLYYLQNGRDMYVDQELDINRLSDYDVDHIVPQSFLKDDSIDNKVLTRSDKNRGKSDNVPSEEVVKKMKNYWRQLLNAKLITQRKFDNLTKAERGGLSELDKAGFIKRQLVETRQITKHVAQILDSRMNTKYDENDKLIREVKVITLKSKLVSDFRKDFQFYKVREINNYHHAHDAYLNAVVGTALIKKYPKLESEFVYGDYKVYDVRKMIAKSEQEIGKATAKYFFYSNIMNFFKTEITLANGEIRKRPLIETNGETGEIVWDKGRDFATVRKVLSMPQVNIVKKTEVQTGGFSKESILPKRNSDKLIARKKDWDPKKYGGFDSPTVAYSVLVVAKVEKGKSKKLKSVKELLGITIMERSSFEKNPIDFLEAKGYKEVKKDLIIKLPKYSLFELENGRKRMLASAGELQKGNELALPSKYVNFLYLASHYEKLKGTAHAEIMALRQGGLVMQNYRLIDATLYVTFEPCVMCAGAMIHSRIGRVVFGVRNAKTGAAGSLMDVLHYPGMNHRVEITEGILADECAALLCYFFRMPRQVFNAQKKAQSSTDGSSGSETPGTSESATPESSGSEVEFSHEYWMRHALTLAKRARDEREVPVGAVLVLNNRVIGEGWNRAIGLHDPSPEDNEQKQLFVEQHKHYLDEIIEQISEFSKRVILADANLDKVLSAYNKHRDKPIREQAENIIHLFTLTNLGAPAAFKYFDTTIDRKRYTSTKEVLDATLIHQSITGLYETRIDLSQLGGD

SEQ ID NO: 170 - protein, 178 aa, Escherichia coli
MRRAFITGVFFLSEVEFSHEYWMRHALTLAKRAWDEREVPVGAVLVHNNRVIGEGWNRPIGRHDPTAHAEIMALRQGGLVMQNYRLIDATLYVTLEPCVMCAGAMIHSRIGRVVFGARDAKTGAAGSLMDVLHHPGMNHRVEITEGILADECAALLSDFFRMRRQEIKAQKKAQSSTD

SEQ ID NO: 171 - protein, 167 aa, Escherichia coli; identical to SEQ ID NO: 29

SEQ ID NO: 172 - protein, 208 aa, Petromyzon marinus
MTDAEYVRIHEKLDIYTFKKQFFNNKKSVSHRCYVLFELKRRGERRACFWGYAVNKPQSGTERGIHAEIFSIRKVEEYLRDNPGQFTINWYSSWSPCADCAEKILEWYNQELRGNGHTLKIWACKLYYEKNARNQIGLWNLRDNGVGLNVMVSEHYQCCRKIFIQSSHNQLNENRWLEKTLKRAEKRRSELSIMIQVKILHTTKSPAV

SEQ ID NO: 173 - DNA, 766 bp, Petromyzon marinus
tgacacgacacagccgtgtatatgaggaagggtagctggatggggggggggggaatacgttcagagaggacattagcgagcgtcttgttggtggccttgagtctagacacctgcagacatgaccgacgctgagtacgtgagaatccatgagaagttggacatctacacgtttaagaaacagtttttcaacaacaaaaaatccgtgtcgcatagatgctacgttctctttgaattaaaacgacggggtgaacgtagagcgtgtttttggggctatgctgtgaataaaccacagagcgggacagaacgtggaattcacgccgaaatctttagcattagaaaagtcgaagaatacctgcgcgacaaccccggacaattcacgataaattggtactcatcctggagtccttgtgcagattgcgctgaaaagatcttagaatggtataaccaggagctgcgggggaacggccacactttgaaaatctgggcttgcaaactctattacgagaaaaatgcgaggaatcaaattgggctgtggaacctcagagataacggggttgggttgaatgtaatggtaagtgaacactaccaatgttgcaggaaaatattcatccaatcgtcgcacaatcaattgaatgagaatagatggcttgagaagactttgaagcgagctgaaaaacgacggagcgagttgtccattatgattcaggtaaaaatactccacaccactaagagtcctgctgtttaagaggctatgcggatggttttc

SEQ ID NO: 174 - protein, 145 aa, Homo sapiens
MDSLLMNRRKFLYQFKNVRWAKGRRETYLCYVVKRRDSATSFSLDFGYLRNKNGCHVELLFLRYISDWDLDPGRCYRVTWFTSWSPCYDCARHVADFLRGNPNLSLRIFTARLYFCEDRKAEPEGLRRLHRAGVQIAIMTFKAPV

SEQ ID NO: 175 - DNA, 10681 bp, Homo sapiens
agagaaccatcattaattgaagtgagatttttctggcctgagacttgcagggaggcaagaagacactctggacaccactatggacaggtaaagaggcagtcttctcgtgggtgattgcactggccttcctctcagagcaaatctgagtaatgagactggtagctatccctttctctcatgtaactgtctgactgataagatcagcttgatcaatatgcatatatattttttgatctgtctccttttcttctattcagatcttatacgctgtcagcccaattctttctgtttcagacttctcttgatttccctctttttcatgtggcaaaagaagtagtgcgtacaatgtactgattcgtcctgagatttgtaccatggttgaaactaatttatggtaataatattaacatagcaaatctttagagactcaaatcatgaaaaggtaatagcagtactgtactaaaaacggtagtgctaattttcgtaataattttgtaaatattcaacagtaaaacaacttgaagacacactttcctagggaggcgttactgaaataatttagctatagtaagaaaatttgtaattttagaaatgccaagcattctaaattaattgcttgaaagtcactatgattgtgtccattataaggagacaaattcattcaagcaagttatttaatgttaaaggcccaattgttaggcagttaatggcacttttactattaactaatctttccatttgttcagacgtagcttaacttacctcttaggtgtgaatttggttaaggtcctcataatgtctttatgtgcagtttttgataggttattgtcatagaacttattctattcctacatttatgattactatggatgtatgagaataacacctaatccttatactttacctcaatttaactcctttataaagaacttacattacagaataaagattttttaaaaatatatttttttgtagagacagggtcttagcccagccgaggctggtctctaagtcctggcccaagcgatcctcctgcctgggcctcctaaagtgctggaattatagacatgagccatcacatccaatatacagaataaagatttttaatggaggatttaatgttcttcagaaaattttcttgaggtcagacaatgtcaaatgtctcctcagtttacactgagattttgaaaacaagtctgagctataggtccttgtgaagggtccattggaaatacttgttcaaagtaaaatggaaagcaaaggtaaaatcagcagttgaaattcagagaaagacagaaaaggagaaaagatgaaattcaacaggacagaagggaaatatattatcattaaggaggacagtatctgtagagctcattagtgatggcaaaatgacttggtcaggattatttttaacccgcttgtttctggtttgcacggctggggatgcagctagggttctgcctcagggagcacagctgtccagagcagctgtcagcctgcaagcctgaaacactccctcggtaaagtccttcctactcaggacagaaatgacgagaacagggagctggaaacaggcccctaaccagagaagggaagtaatggatcaacaaagttaactagcaggtcaggatcacgcaattcatttcactctgactggtaacatgtgacagaaacagtgtaggcttattgtattttcatgtagagtaggacccaaaaatccacccaaagtcctttatctatgccacatccttcttatctatacttccaggacactttttcttccttatgataaggctctctctctctccacacacacacacacacacacacacacacacacacacacacacacaaacacacaccccgccaaccaaggtgcatgtaaaaagatgtagattcctctgcctttctcatctacacagcccaggagggtaagttaatataagagggatttattggtaagagatgatgcttaatctgtttaacactgggcctcaaagagagaatttcttttcttctgtacttattaagcacctattatgtgttgagcttatatatacaaagggttattatatgctaatatagtaatagtaatggtggttggtactatggtaattaccataaaaattattatccttttaaaataaagctaattattattggatcttttttagtattcattttatgttttttatgtttttgattttttaaaagacaatctcaccctgttacccaggctggagtgcagtggtgcaatcatagctttctgcagtcttgaactcctgggctcaagcaatcctcctgccttggcctcccaaagtgttgggatacagtcatgagccactgcatctggcctaggatccatttagattaaaatatgcattttaaattttaaaataatatggctaatttttaccttatgtaatgtgtatactggcaataaatctagtttgctgcctaaagtttaaagtgctttccagtaagcttcatgtacgtgaggggagacatttaaagtgaaacagacagccaggtgtggtggctcacgcctgtaatcccagcactctgggaggctgaggtgggtggatcgcttgagccctggagttcaagaccagcctgagcaacatggcaaaacgctgtttctataacaaaaattagccgggcatggtggcatgtgcctgtggtcccagctactagggggctgaggcaggagaatcgttggagcccaggaggtcaaggctgcactgagcagtgcttgcgccactgcactccagcctgggtgacaggaccagaccttgcctcaaaaaaataagaagaaaaattaaaaataaatggaaacaactacaaagagctgttgtcctagatgagctacttagttaggctgatattttggtatttaacttttaaagtcagggtctgtcacctgcactacattattaaaatatcaattctcaatgtatatccacacaaagactggtacgtgaatgttcatagtacctttattcacaaaaccccaaagtagagactatccaaatatccatcaacaagtgaacaaataaacaaaatgtgctatatccatgcaatggaataccaccctgcagtacaaagaagctacttggggatgaatcccaaagtcatgacgctaaatgaaagagtcagacatgaaggaggagataatgtatgccatacgaaattctagaaaatgaaagtaacttatagttacagaaagcaaatcagggcaggcatagaggctcacacctgtaatcccagcactttgagaggccacgtgggaagattgctagaactcaggagttcaagaccagcctgggcaacacagtgaaactccattctccacaaaaatgggaaaaaaagaaagcaaatcagtggttgtcctgtggggaggggaaggactgcaaagagggaagaagctctggtggggtgagggtggtgattcaggttctgtatcctgactgtggtagcagtttggggtgtttacatccaaaaatattcgtagaattatgcatcttaaatgggtggagtttactgtatgtaaattatacctcaatgtaagaaaaaataatgtgtaagaaaactttcaattctcttgccagcaaacgttattcaaattcctgagccctttacttcgcaaattctctgcacttctgccccgtaccattaggtgacagcactagctccacaaattggataaatgcatttctggaaaagactagggacaaaatccaggcatcacttgtgctttcatatcaaccatgctgtacagcttgtgttgctgtctgcagctgcaatggggactcttgatttctttaaggaaacttgggttaccagagtatttccacaaatgctattcaaattagtgcttatgatatgcaagacactgtgctaggagccagaaaacaaagaggaggagaaatcagtcattatgtgggaacaacatagcaagatatttagatcattttgactagttaaaaaagcagcagagtacaaaatcacacatgcaatcagtataatccaaatcatgtaaatatgtgcctgtagaaagactagaggaataaacacaagaatcttaacagtcattgtcattagacactaagtctaattattattattagacactatgatatttgagatttaaaaaatctttaatattttaaaatttagagctcttctatttttccatagtattcaagtttgacaatgatcaagtattactctttctttttttttttttttttttttttttgagatggagttttggtcttgttgcccatgctggagtggaatggcatgaccatagctcactgcaacctccacctcctgggttcaagcaaagctgtcgcctcagcctcccgggtagatgggattacaggcgcccaccaccacactcggctaatgtttgtatttttagtagagatggggtttcaccatgttggccaggctggtctcaaactcctgacctcagaggatccacctgcctcagcctcccaaagtgctgggattacagatgtaggccactgcgcccggccaagtattgctcttatacattaaaaaacaggtgtgagccactgcgcccagccaggtattgctcttatacattaaaaaataggccggtgcagtggctcacgcctgtaatcccagcactttgggaagccaaggcgggcagaacacccgaggtcaggagtccaaggccagcctggccaagatggtgaaaccccgtctctattaaaaatacaaacattacctgggcatgatggtgggcgcctgtaatcccagctactcaggaggctgaggcaggaggatccgcggagcctggcagatctgcctgagcctgggaggttgaggctacagtaagccaagatcatgccagtatacttcagcctgggcgacaaagtgagaccgtaacaaaaaaaaaaaaatttaaaaaaagaaatttagatcaagatccaactgtaaaaagtggcctaaacaccacattaaagagtttggagtttattctgcaggcagaagagaaccatcagggggtcttcagcatgggaatggcatggtgcacctggtttttgtgagatcatggtggtgacagtgtggggaatgttattttggagggactggaggcagacagaccggttaaaaggccagcacaacagataaggaggaagaagatgagggcttggaccgaagcagagaagagcaaacagggaaggtacaaattcaagaaatattggggggtttgaatcaacacatttagatgattaattaaatatgaggactgaggaataagaaatgagtcaaggatggttccaggctgctaggctgcttacctgaggtggcaaagtcgggaggagtggcagtttaggacagggggcagttgaggaatattgttttgatcattttgagtttgaggtacaagttggacacttaggtaaagactggaggggaaatctgaatatacaattatgggactgaggaacaagtttattttattttttgtttcgttttcttgttgaagaacaaatttaattgtaatcccaagtcatcagcatctagaagacagtggcaggaggtgactgtcttgtgggtaagggtttggggtccttgatgagtatctctcaattggccttaaatataagcaggaaaaggagtttatgatggattccaggctcagcagggctcaggagggctcaggcagccagcagaggaagtcagagcatcttctttggtttagcccaagtaatgacttccttaaaaagctgaaggaaaatccagagtgaccagattataaactgtactcttgcattttctctccctcctctcacccacagcctcttgatgaaccggaggaagtttctttaccaattcaaaaatgtccgctgggctaagggtcggcgtgagacctacctgtgctacgtagtgaagaggcgtgacagtgctacatccttttcactggactttggttatcttcgcaataaggtatcaattaaagtcggctttgcaagcagtttaatggtcaactgtgagtgcttttagagccacctgctgatggtattacttccatccttttttggcatttgtgtctctatcacattcctcaaatccttttttttatttctttttccatgtccatgcacccatattagacatggcccaaaatatgtgatttaattcctccccagtaatgctgggcaccctaataccactccttccttcagtgccaagaacaactgctcccaaactgtttaccagctttcctcagcatctgaattgcctttgagattaattaagctaaaagcatttttatatgggagaatattatcagcttgtccaagcaaaaattttaaatgtgaaaaacaaattgtgtcttaagcatttttgaaaattaaggaagaagaatttgggaaaaaattaacggtggctcaattctgtcttccaaatgatttcttttccctcctactcacatgggtcgtaggccagtgaatacattcaacatggtgatccccagaaaactcagagaagcctcggctgatgattaattaaattgatctttcggctacccgagagaattacatttccaagagacttcttcaccaaaatccagatgggtttacataaacttctgcccacgggtatctcctctctcctaacacgctgtgacgtctgggcttggtggaatctcagggaagcatccgtggggtggaaggtcatcgtctggctcgttgtttgatggttatattaccatgcaattttctttgcctacatttgtattgaatacatcccaatctccttcctattcggtgacatgacacattctatttcagaaggctttgattttatcaagcactttcatttacttctcatggcagtgcctattacttctcttacaatacccatctgtctgctttaccaaaatctatttccccttttcagatcctcccaaatggtcctcataaactgtcctgcctccacctagtggtccaggtatatttccacaatgttacatcaacaggcacttctagccattttccttctcaaaaggtgcaaaaagcaacttcataaacacaaattaaatcttcggtgaggtagtgtgatgctgcttcctcccaactcagcgcacttcgtcttcctcattccacaaaaacccatagccttccttcactctgcaggactagtgctgccaagggttcagctctacctactggtgtgctcttttgagcaagttgcttagcctctctgtaacacaaggacaatagctgcaagcatccccaaagatcattgcaggagacaatgactaaggctaccagagccgcaataaaagtcagtgaattttagcgtggtcctctctgtctctccagaacggctgccacgtggaattgctcttcctccgctacatctcggactgggacctagaccctggccgctgctaccgcgtcacctggttcacctcctggagcccctgctacgactgtgcccgacatgtggccgactttctgcgagggaaccccaacctcagtctgaggatcttcaccgcgcgcctctacttctgtgaggaccgcaaggctgagcccgaggggctgcggcggctgcaccgcgccggggtgcaaatagccatcatgaccttcaaaggtgcgaaagggccttccgcgcaggcgcagtgcagcagcccgcattcgggattgcgatgcggaatgaatgagttagtggggaagctcgaggggaagaagtgggcggggattctggttcacctctggagccgaaattaaagattagaagcagagaaaagagtgaatggctcagagacaaggccccgaggaaatgagaaaatggggccagggttgcttctttcccctcgatttggaacctgaactgtcttctacccccatatccccgcctttttttcctttttttttttttgaagattatttttactgctggaatacttttgtagaaaaccacgaaagaactttcaaagcctgggaagggctgcatgaaaattcagttcgtctctccagacagcttcggcgcatccttttggtaaggggcttcctcgctttttaaattttctttctttctctacagtcttttttggagtttcgtatatttcttatattttcttattgttcaatcactctcagttttcatctgatgaaaactttatttctcctccacatcagctttttcttctgctgtttcaccattcagagccctctgctaaggttccttttccctcccttttctttcttttgttgtttcacatctttaaatttctgtctctccccagggttgcgtttccttcctggtcagaattcttttctcctttttttttttttttttttttttttttaaacaaacaaacaaaaaacccaaaaaaactctttcccaatttactttcttccaacatgttacaaagccatccactcagtttagaagactctccggccccaccgacccccaacctcgttttgaagccattcactcaatttgcttctctctttctctacagcccctgtatgaggttgatgacttacgagacgcatttcgtactttgggactttgatagcaacttccaggaatgtcacacacgatgaaatatctctgctgaagacagtggataaaaaacagtccttcaagtcttctctgtttttattcttcaactctcactttcttagagtttacagaaaaaatatttatatacgactctttaaaaagatctatgtcttgaaaatagagaaggaacacaggtctggccagggacgtgctgcaattggtgcagttttgaatgcaacattgtcccctactgggaataacagaactgcaggacctgggagcatcctaaagtgtcaacgtttttctatgacttttaggtaggatgagagcagaaggtagatcctaaaaagcatggtgagaggatcaaatgtttttatatcaacatcctttattatttgattcatttgagttaacagtggtgttagtgatagatttttctattcttttcccttgacgtttactttcaagtaacacaaactcttccatcaggccatgatctataggacctcctaatgagagtatctgggtgattgtgaccccaaaccatctctccaaagcattaatatccaatcatgcgctgtatgttttaatcagcagaagcatgtttttatgtttgtacaaaagaagattgttatgggtggggatggaggtatagaccatgcatggtcaccttcaagctactttaataaaggatcttaaaatgggcaggaggactgtgaacaagacaccctaataatgggttgatgtctgaagtagcaaatcttctggaaacgcaaactcttttaaggaagtccctaatttagaaacacccacaaacttcacatatcataattagcaaacaattggaaggaagttgcttgaatgttggggagaggaaaatctattggctctcgtgggtctcttcatctcagaaatgccaatcaggtcaaggtttgctacattttgtatgtgtgtgatgcttctcccaaaggtatattaactatataagagagttgtgacaaaacagaatgataaagctgcgaaccgtggcacacgctcatagttctagctgcttgggaggttgaggagggaggatggcttgaacacaggtgttcaaggccagcctgggcaacataacaagatcctgtctctcaaaaaaaaaaaaaaaaaaaagaaagagagagggccgggcgtggtggctcacgcctgtaatcccagcactttgggaggccgagccgggcggatcacctgtggtcaggagtttgagaccagcctggccaacatggcaaaaccccgtctgtactcaaaatgcaaaaattagccaggcgtggtagcaggcacctgtaatcccagctacttgggaggctgaggcaggagaatcgcttgaacccaggaggtggaggttgcagtaagctgagatcgtgccgttgcactccagcctgggcgacaagagcaagactctgtctcagaaaaaaaaaaaaaaaagagagagagagagaaagagaacaatatttgggagagaaggatggggaagcattgcaaggaaattgtgctttatccaacaaaatgtaaggagccaataagggatccctatttgtctcttttggtgtctatttgtccctaacaactgtctttgacagtgagaaaaatattcagaataaccatatccctgtgccgttattacctagcaacccttgcaatgaagatgagcagatccacaggaaaacttgaatgcacaactgtcttattttaatcttattgtacataagtttgtaaaagagttaaaaattgttacttcatgtattcatttatattttatattattttgcgtctaatgattttttattaacatgatttccttttctgatatattgaaatggagtctcaaagcttcataaatttataactttagaaatgattctaataacaacgtatgtaattgtaacattgcagtaatggtgctacgaagccatttctcttgatttttagtaaacttttatgacagcaaatttgcttctggctcactttcaatcagttaaataaatgataaataattttggaagctgtgaagataaaataccaaataaaataatataaaagtgatttatatgaagttaaaataaaaaatcagtatgatggaataaacttg

SEQ ID NO: 176 - protein, 198 aa, Homo sapiens [sequence omitted]

SEQ ID NO: 177 - protein, 198 aa, Mus musculus
MDSLLMKQKKFLYHFKNVRWAKGRHETYLCYVVKRRDSATSCSLDFGHLRNKSGCHVELLFLRYISDWDLDPGRCYRVTWFTSWSPCYDCARHVAEFLRWNPNLSLRIFTARLYFCEDRKAEPEGLRRLHRAGVQIGIMTFKDYFYCWNTFVENRERTFKAWEGLHENSVRLTRQLRRILLPLYEVDDLRDAFRMLGF

SEQ ID NO: 178 - protein, 198 aa, Canis lupus
MDSLLMKQRKFLYHFKNVRWAKGRHETYLCYVVKRRDSATSFSLDFGHLRNKSGCHVELLFLRYISDWDLDPGRCYRVTWFTSWSPCYDCARHVADFLRGYPNLSLRIFAARLYFCEDRKAEPEGLRRLHRAGVQIAIMTFKDYFYCWNTFVENREKTFKAWEGLHENSVRLSRQLRRILLPLYEVDDLRDAFRTLGL

SEQ ID NO: 179 - protein, 199 aa, Bos taurus
MDSLLKKQRQFLYQFKNVRWAKGRHETYLCYVVKRRDSPTSFSLDFGHLRNKAGCHVELLFLRYISDWDLDPGRCYRVTWFTSWSPCYDCARHVADFLRGYPNLSLRIFTARLYFCDKERKAEPEGLRRLHRAGVQIAIMTFKDYFYCWNTFVENHERTFKAWEGLHENSVRLSRQLRRILLPLYEVDDLRDAFRTLGL

SEQ ID NO: 180 - protein, 239 aa, Rattus norvegicus
MAVGSKPKAALVGPHWERERIWCFLCSTGLGTQQTGQTSRWLRPAATQDPVSPPRSLLMKQRKFLYHFKNVRWAKGRHETYLCYVVKRRDSATSFSLDFGYLRNKSGCHVELLFLRYISDWDLDPGRCYRVTWFTSWSPCYDCARHVADFLRGNPNLSLRIFTARLTGWGALPAGLMSPARPSDYFYCWNTFVENHERTFKAWEGLHENSVRLSRRLRRILLPLYEVDDLRDAFRTLGL

SEQ ID NO: 181 - protein, 198 aa, Mus musculus [sequence omitted]

SEQ ID NO: 182 - protein, 229 aa, Rattus norvegicus [sequence omitted]

SEQ ID NO: 183 - protein, 229 aa, Mesocricetus auratus
MSSETGPVVVDPTLRRRIEPHEFDAFFDQGELRKETCLLYEIRWGGRHNIWRHTGQNTSRHVEINFIEKFTSERYFYPSTRCSIVWFLSWSPCGECSKAITEFLSGHPNVTLFIYAARLYHHTDQRNRQGLRDLISRGVTIRIMTEQEYCYCWRNFVNYPPSNEVYWPRYPNLWMRLYALELYCIHLGLPPCLKIKRRHQYPLTFFRLNLQSCHYQRIPPHILWATGFI

SEQ ID NO: 184 - protein, 236 aa, Pongo pygmaeus
MTSEKGPSTGDPTLRRRIESWEFDVFYDPRELRKETCLLYEIKWGMSRKIWRSSGKNTTNHVEVNFIKKFTSERRFHSSISCSITWFLSWSPCWECSQAIREFLSQHPGVTLVIYVARLFWHMDQRNRQGLRDLVNSGVTIQIMRASEYYHCWRNFVNYPPGDEAHWPQYPPLWMMLYALELHCIILSLPPCLKISRRWQNHLAFFRLHLQNCHYQTIPPHILLATGLIHPSVTWR

SEQ ID NO: 185 - protein, 236 aa, Oryctolagus cuniculus
MASEKGPSNKDYTLRRRIEPWEFEVFFDPQELRKEACLLYEIKWGASSKTWRSSGKNTTNHVEVNFLEKLTSEGRLGPSTCCSITWFLSWSPCWECSMAIREFLSQHPGVTLIIFVARLFQHMDRRNRQGLKDLVTSGVTVRVMSVSEYCYCWENFVNYPPGKAAQWPRYPPRWMLMYALELYCIILGLPPCLKISRRHQKQLTFFSLTPQYCHYKMIPPYILLATGLLQPSVPWR

SEQ ID NO: 186 - protein, 235 aa, Monodelphis domestica
MNSKTGPSVGDATLRRRIKPWEFVAFFNPQELRKETCLLYEIKWGNQNIWRHSNQNTSQHAEINFMEKFTAERHFNSSVRCSITWFLSWSPCWECSKAIRKFLDHYPNVTLAIFISRLYWHMDQQHRQGLKELVHSGVTIQIMSYSEYHYCWRNFVDYPQGEEDYWPKYPYLWIMLYVLELHCIILGLPPCLKISGSHSNQLALFSLDLQDCHYQKIPYNVLVATGLVQPFVTWR

SEQ ID NO: 187 - protein, 224 aa, Pongo pygmaeus
MAQKEEAAAATEAASQNGEDLENLDDPEKLKELIELPPFEIVTGERLPANFFKFQFRNVEYSSGRNKTFLCYVVEAQGKGGQVQASRGYLEDEHAAAHAEEAFFNTILPAFDPALRYNVTWYVSSSPCAACADRIIKTLSKTKNLRLLILVGRLFMWEELEIQDALKKLKEAGCKLRIMKPQDFEYVWQNFVEQEEGESKAFQPWEDIQENFLYYEEKLADILK

SEQ ID NO: 188 - protein, 224 aa, Bos taurus
MAQKEEAAAAAEPASQNGEEVENLEDPEKLKELIELPPFEIVTGERLPAHYFKFQFRNVEYSSGRNKTFLCYVVEAQSKGGQVQASRGYLEDEHATNHAEEAFFNSIMPTFDPALRYMVTWYVSSSPCAACADRIVKTLNKTKNLRLLILVGRLFMWEEPEIQAALRKLKEAGCRLRIMKPQDFEYIWQNFVEQEEGESKAFEPWEDIQENFLYYEEKLADILK

SEQ ID NO: 189 - protein, 440 aa, Mus musculus
MQPQRLGPRAGMGPFCLGCSHRKCYSPIRNLISQETFKFHFKNLGYAKGRKDTFLCYEVTRKDCDSPVSLHHGVFKNKDNIHAEICFLYWFHDKVLKVLSPREEFKITWYMSWSPCFECAEQIVRFLATHHNLSLDIFSSRLYNVQDPETQQNLCRLVQEGAQVAAMDLYEFKKCWKKFVDNGGRRFRPWKRLLTNFRYQDSKLQEILRPCYISVPSSSSSTLSNICLTKGLPETRFWVEGRRMDPLSEEEFYSQFYNQRVKHLCYYHRMKPYLCYQLEQFNGQAPLKGCLLSEKGKQHAEILFLDKIRSMELSQVTITCYLTWSPCPNCAWQLAAFKRDRPDLILHIYTSRLYFHWKRPFQKGLCSLWQSGILVDVMDLPQFTDCWTNFVNPKRPFWPWKGLEIISRRTQRRLRRIKESWGLQDLVNDFGNLQLGPPMS

SEQ ID NO: 190 - protein, 429 aa, Mus musculus
MGPFCLGCSHRKCYSPIRNLISQETFKFHFKNLGYAKGRKDTFLCYEVTRKDCDSPVSLHHGVFKNKDNIHAEICFLYWFHDKVLKVLSPREEFKITWYMSWSPCFECAEQIVRFLATHHNLSLDIFSSRLYNVQDPETQQNLCRLVQEGAQVAAMDLYEFKKCWKKFVDNGGRRFRPWKRLLTNFRYQDSKLQEILRPCYIPVPSSSSSTLSNICLTKGLPETRFCVEGRRMDPLSEEEFYSQFYNQRVKHLCYYHRMKPYLCYQLEQFNGQAPLKGCLLSEKGKQHAEILFLDKIRSMELSQVTITCYLTWSPCPNCAWQLAAFKRDRPDLILHIYTSRLYFHWKRPFQKGLCSLWQSGILVDVMDLPQFTDCWTNFVNPKRPFWPWKGLEIISRRTQRRLRRIKESWGLQDLVNDFGNLQLGPPMS

SEQ ID NO: 191 - protein, 430 aa, Rattus norvegicus
MGPFCLGCSHRKCYSPIRNLISQETFKFHFKNRLRYAIDRKDTFLCYEVTRKDCDSPVSLHHGVFKNKDNIHAEICFLYWFHDKVLKVLSPREEFKITWYMSWSPCFECAEQVLRFLATHHNLSLDIFSSRLYNIRDPENQQNLCRLVQEGAQVAAMDLYEFKKCWKKFVDNGGRRFRPWKKLLTNFRYQDSKLQEILRPCYIPVPSSSSSTLSNICLTKGLPETRFCVERRRVHLLSEEEFYSQFYNQRVKHLCYYHGVKPYLCYQLEQFNGQAPLKGCLLSEKGKQHAEILFLDKIRSMELSQVIITCYLTWSPCPNCAWQLAAFKRDRPDLILHIYTSRLYFHWKRPFQKGLCSLWQSGILVDVMDLPQFTDCWTNFVNPKRPFWPWKGLEIISRRTQRRLHRIKESWGLQDLVNDFGNLQLGPPMS

SEQ ID NO: 192 - protein, 199 aa, Homo sapiens
MEASPASGPRHLMDPHIFTSNFNNGIGRHKTYLCYEVERLDNGTSVKMDQHRGFLHNQAKNLLCGFYGRHAELRFLDLVPSLQLDPAQIYRVTWFISWSPCFSWGCAGEVRAFLQENTHVRLRIFAARIYDYDPLYKEALQMLRDAGAQVSIMTYDEFKHCWDTFVDHQGCPFQPWDGLDEHSQALSGRLRAILQNQGN

SEQ ID NO: 193 - protein, 373 aa, Homo sapiens
MKPHFRNTVERMYRDTFSYNFYNRPILSRRNTVWLCYEVKTKGPSRPRLDAKIFRGQVYSQPEHHAEMCFLSWFCGNQLPAYKCFQITWFVSWTPCPDCVAKLAEFLAEHPNVTLTISAARLYYYWERDYRRALCRLSQAGARVKIMDDEEFAYCWENFVYSEGQPFMPWYKFDDNYAFLHRTLKEILRNPMEAMYPHIFYFHFKNLRKAYGRNESWLCFTMEVVKHHSPVSWKRGVFRNQVDPETHCHAERCFLSWFCDDILSPNTNYEVTWYTSWSPCPECAGEVAEFLARHSNVNLTIFTARLYYFWDTDYQEGLRSLSQEGASVEIMGYKDFKYCWENFVYNDDEPFKPWKGLKYNFLFLDSKLQEILE

SEQ ID NO: 194 - protein, 370 aa, Macaca mulatta
MVEPMDPRTFVSNFNNRPILSGLNTVWLCCEVKTKDPSGPPLDAKIFQGKVYSKAKYHPEMRFLRWFHKWRQLHHDQEYKVTWYVSWSPCTRCANSVATFLAKDPKVTLTIFVARLYYFWKPDYQQALRILCQKRGGPHATMKIMNYNEFQDCWNKFVDGRGKPFKPRNNLPKHYTLLQATLGELLRHLMDPGTFTSNFNNKPWVSGQHETYLCYKVERLHNDTWVPLNQHRGFLRNQAPNIHGFPKGRHAELCFLDLIPFWKLDGQQYRVTCFTSWSPCFSCAQEMAKFISNNEHVSLCIFAARIYDDQGRYQEGLRALHRDGAKIAMMNYSEFEYCWDTFVDRQGRPFQPWDGLDEHSQALSGRLRAI

SEQ ID NO: 195 - protein, 384 aa, Pan troglodytes
MKPHFRNPVERMYQDTFSDNFYNRPILSHRNTVWLCYEVKTKGPSRPPLDAKIFRGQVYSKLKYHPEMRFFHWFSKWRKLHRDQEYEVTWYISWSPCTKCTRDVATFLAEDPKVTLTIFVARLYYFWDPDYQEALRSLCQKRDGPRATMKIMNYDEFQHCWSKFVYSQRELFEPWNNLPKYYILLHIMLGEILRHSMDPPTFTSNFNNELWVRGRHETYLCYEVERLHNDTWVLLNQRRGFLCNQAPHKHGFLEGRHAELCFLDVIPFWKLDLHQDYRVTCFTSWSPCFSCAQEMAKFISNNKHVSLCIFAARIYDDQGRCQEGLRTLAKAGAKISIMTYSEFKHCWDTFVDHQGCPFQPWDGLEEHSQALSGRLRAILQNQGN

SEQ ID NO: 196 - protein, 377 aa, Chlorocebus sabaeus
MNPQIRNMVEQMEPDIFVYYFNNRPILSGRNTVWLCYEVKTKDPSGPPLDANIFQGKLYPEAKDHPEMKFLHWFRKWRQLHRDQEYEVTWYVSWSPCTRCANSVATFLAEDPKVTLTIFVARLYYFWKPDYQQALRILCQERGGPHATMKIMNYNEFQHCWNEFVDGQGKPFKPRKNLPKHYTLLHATLGELLRHVMDPGTFTSNFNNKPWVSGQRETYLCYKVERSHNDTWVLLNQHRGFLRNQAPDRHGFPKGRHAELCFLDLIPFWKLDDQQYRVTCFTSWSPCFSCAQKMAKFISNNKHVSLCIFAARIYDDQGRCQEGLRTLHRDGAKIAVMNYSEFEYCWDTFVDRQGRPFQPWDGLDEHSQALSGRLRAI

SEQ ID NO: 197 - protein, 384 aa, Homo sapiens
MKPHFRNTVERMYRDTFSYNFYNRPILSRRNTVWLCYEVKTKGPSRPPLDAKIFRGQVYSELKYHPEMRFFHWFSKWRKLHRDQEYEVTWYISWSPCTKCTRDMATFLAEDPKVTLTIFVARLYYFWDPDYQEALRSLCQKRDGPRATMKIMNYDEFQHCWSKFVYSQRELFEPWNNLPKYYILLHIMLGEILRHSMDPPTFTFNFNNEPWVRGRHETYLCYEVERMHNDTWVLLNQRRGFLCNQAPHKHGFLEGRHAELCFLDVIPFWKLDLDQDYRVTCFTSWSPCFSCAQEMAKFISKNKHVSLCIFTARIYDDQGRCQEGLRTLAEAGAKISIMTYSEFKHCWDTFVDHQGCPFQPWDGLDEHSQDLSGRLRAILQNQEN

SEQ ID NO: 198 - protein, 382 aa, Homo sapiens
MNPQIRNPMERMYRDTFYDNFENEPILYGRSYTWLCYEVKIKRGRSNLLWDTGVFRGQVYFKPQYHAEMCFLSWFCGNQLPAYKCFQITWFVSWTPCPDCVAKLAEFLSEHPNVTLTISAARLYYYWERDYRRALCRLSQAGARVTIMDYEEFAYCWENFVYNEGQQFMPWYKFDENYAFLHRTLKEILRYLMDPDTFTFNFNNDPLVLRRRQTYLCYEVERLDNGTWVLMDQHMGFLCNEAKNLLCGFYGRHAELRFLDLVPSLQLDPAQIYRVTWFISWSPCFSWGCAGEVRAFLQENTHVRLRIFAARIYDYDPLYKEALQMLRDAGAQVSIMTYDEFEYCWDTFVYRQGCPFQPWDGLEEHSQALSGRLRAILQNQGN

SEQ ID NO: 199 - protein, 395 aa, Rattus norvegicus
MQPQGLGPNAGMGPVCLGCSHRRPYSPIRNPLKKLYQQTFYFHFKNVRYAWGRKNNFLCYEVNGMDCALPVPLRQGVFRKQGHIHAELCFIYWFHDKVLRVLSPMEEFKVTWYMSWSPCSKCAEQVARFLAAHRNLSLAIFSSRLYYYLRNPNYQQKLCRLIQEGVHVAAMDLPEFKKCWNKFVDNDGQPFRPWMRLRINFSFYDCKLQEIFSRMNLLREDVFYLQFNNSHRVKPVQNRYYRRKSYLCYQLERANGQEPLKGYLLYKKGEQHVEILFLEKMRSMELSQVRITCYLTWSPCPNCARQLAAFKKDHPDLILRIYTSRLYFWRKKFQKGLCTLWRSGIHVDVMDLPQFADCWTNFVNPQRPFRPWNELEKNSWRIQRRLRRIKESWGL

SEQ ID NO: 200 - protein, 226 aa, Bos taurus
DGWEVAFRSGTVLKAGVLGVSMTEGWAGSGHPGQGACVWTPGTRNTMNLLREVLFKQQFGNQPRVPAPYYRRKTYLCYQLKQRNDLTLDRGCFRNKKQRHAERFIDKINSLDLNPSQSYKIICYITWSPCPNCANELVNFITRNNHLKLEIFASRLYFHWIKSFKMGLQDLQNAGISVAVMTHTEFEDCWEQFVDNQSRPFQPWDKLEQYSASIRRRLQRILTAPI

SEQ ID NO: 201 - protein, 490 aa, Pan troglodytes
MNPQIRNPMEWMYQRTFYYNFENEPILYGRSYTWLCYEVKIRRGHSNLLWDTGVFRGQMYSQPEHHAEMCFLSWFCGNQLSAYKCFQITWFVSWTPCPDCVAKLAKFLAEHPNVTLTISAARLYYYWERDYRRALCRLSQAGARVKIMDDEEFAYCWENFVYNEGQPFMPWYKFDDNYAFLHRTLKEIIRHLMDPDTFTFNFNNDPLVLRRHQTYLCYEVERLDNGTWVLMDQHMGFLCNEAKNLLCGFYGRHAELRFLDLVPSLQLDPAQIYRVTWFISWSPCFSWGCAGQVRAFLQENTHVRLRIFAARIYDYDPLYKEALQMLRDAGAQVSIMTYDEFEYCWDTFVYRQGCPFQPWDGLEEHSQALSGRLRAILQVRASSLCMVPHRPPPPPQSPGPCLPLCSEPPLGSLLPTGRPAPSLPFLLTASFSFPPPASLPPLPSLSLSPGHLPVPSFHSLTSCSIQPPCSSRIRETEGWASVSKEGRDLG

SEQ ID NO: 202 - protein, 190 aa, Homo sapiens
MNPQIRNPMKAMYPGTFYFQFKNLWEANDRNETWLCFTVEGIKRRSVVSWKTGVFRNQVDSETHCHAERCFLSWFCDDILSPNTKYQVTWYTSWSPCPDCAGEVAEFLARHSNVNLTIFTARLYYFQYPCYQEGLRSLSQEGVAVEIMDYEDFKYCWENFVYNDNEPFKPWKGLKTNFRLLKRRLRESLQ

SEQ ID NO: 203 - protein, 190 aa, Gorilla gorilla
MNPQIRNPMKAMYPGTFYFQFKNLWEANDRNETWLCFTVEGIKRRSVVSWKTGVFRNQVDSETHCHAERCFLSWECDDILSPNTNYQVTWYTSWSPCPECAGEVAEFLARHSNVNLTIFTARLYYFQDTDYQEGLRSLSQEGVAVKIMDYKDFKYCWENFVYNDDEPFKPWKGLKYNFRFLKRRLQEILE

SEQ ID NO: 204 - protein, 202 aa, Macaca mulatta
MDGSPASRPRHLMDPNTFTFNFNNDLSVRGRHQTYLCYEVERLDNGTWVPMDERRGFLCNKAKNVPCGDYGCHVELRFLCEVPSWQLDPAQTYRVTWFISWSPCFRRGCAGQVRVFLQENKHVRLRIFAARIYDYDPLYQEALRTLRDAGAQVSIMTYEEFKHCWDTFVDRQGRPFQPWDGLDEHSQALSGRLRAILQNQGN

SEQ ID NO: 205 - protein, 185 aa, Bos taurus
MDEYTFTENFNNQGWPSKTYLCYEMERLDGDATIPLDEYKGFVRNKGLDQPEKPCHAELYFLGKIHSWNLDRNQHYRLTCFISWSPCYDCAQKLTTFLKENHHISLHILASRIYTHNRFGCHQSGLCELQAAGARITIMTFEDFKHCWETFVDHKGKPFQPWEGLNVKSQALCTELQAILKTQQN

SEQ ID NO: 206 - protein, 200 aa, Homo sapiens
MALLTAETFRLQFNNKRRLRRPYYPRKALLCYQLTPQNGSTPTRGYFENKKKCHAEICFINEIKSMGLDETQCYQVTCYLTWSPCSSCAWELVDFIKAHDHLNLGIFASRLYYHWCKPQQKGLRLLCGSQVPVEVMGFPKFADCWENFVDHEKPLSFNPYKMLEELDKNSRAIKRRLERIKIPGVRAQGRYMDILCDAEV

SEQ ID NO: 207 - protein, 210 aa, Macaca mulatta
MALLTAKTFSLQFNNKRRVNKPYYPRKALLCYQLTPQNGSTPTRGHLKNKKKDHAEIRFINKIKSMGLDETQCYQVTCYLTWSPCPSCAGELVDFIKAHRHLNLRIFASRLYYHWRPNYQEGLLLLCGSQVPVEVMGLPEFTDCWENFVDHKEPPSFNPSEKLEELDKNSQAIKRRLERIKSRSVDVLENGLRSLQLGPVTPSSSIRNSR

SEQ ID NO: 208 - protein, 386 aa, Homo sapiens
MNPQIRNPMERMYRDTFYDNFENEPILYGRSYTWLCYEVKIKRGRSNLLWDTGVFRGPVLPKRQSNHRQEVYFRFENHAEMCFLSWFCGNRLPANRRFQITWFVSWNPCLPCVVKVTKFLAEHPNVTLTISAARLYYYRDRDWRWVLLRLHKAGARVKIMDYEDFAYCWENFVCNEGQPFMPWYKFDDNYASLHRTLKEILRNPMEAMYPHIFYFHFKNLLKACGRNESWLCFTMEVTKHHSAVFRKRGVFRNQVDPETHCHAERCFLSWFCDDILSPNTNYEVTWYTSWSPCPECAGEVAEFLARHSNVNLTIFTARLCYFWDTDYQEGLCSLSQEGASVKIMGYKDFVSCWKNFVYSDDEPFKPWKGLQTNFRLLKRRLREILQ

SEQ ID NO: 209 - protein, 236 aa, Homo sapiens
MTSEKGPSTGDPTLRRRIEPWEFDVFYDPRELRKEACLLYEIKWGMSRKIWRSSGKNTTNHVEVNFIKKFTSERDFHPSMSCSITWFLSWSPCWECSQAIREFLSRHPGVTLVIYVARLFWHMDQQNRQGLRDLVNSGVTIQIMRASEYYHCWRNFVNYPPGDEAHWPQYPPLWMMLYALELHCIILSLPPCLKISRRWQNHLTFFRLHLQNCHYQTIPPHILLATGLIHPSVAWR

SEQ ID NO: 210 - protein, 229 aa, Mus musculus
MSSETGPVAVDPTLRRRIEPHEFEVFFDPRELRKETCLLYEINWGGRHSVWRHTSQNTSNHVEVNFLEKFTTERYFRPNTRCSITWFLSWSPCGECSRAITEFLSRHPYVTLFIYIARLYHHTDQRNRQGLRDLISSGVTIQIMTEQEYCYCWRNFVNYPPSNEAYWPRYPHLWVKLYVLELYCIILGLPPCLKILRRKQPQLTFFTITLQTCHYQRIPPHLLWATGLK

SEQ ID NO: 211 - protein, 224 aa, Homo sapiens
MAQKEEAAVATEAASQNGEDLENLDDPEKLKELIELPPFEIVTGERLPANFFKFQFRNVEYSSGRNKTFLCYVVEAQGKGGQVQASRGYLEDEHAAAHAEEAFFNTILPAFDPALRYNVTWYVSSSPCAACADRIIKTLSKTKNLRLLILVGRLFMWEEPEIQAALKKLKEAGCKLRIMKPQDFEYVWQNFVEQEEGESKAFQPWEDIQENFLYYEEKLADILK

SEQ ID NO: 212 - protein, 224 aa, Mus musculus
MAQKEEAAEAAAPASQNGDDLENLEDPEKLKELIDLPPFEIVTGVRLPVNFFKFQFRNVEYSSGRNKTFLCYVVEVQSKGGQAQATQGYLEDEHAGAHAEEAFFNTILPAFDPALKYNVTWYVSSSPCAACADRILKTLSKTKNLRLLILVSRLFMWEEPEVQAALKKLKEAGCKLRIMKPQDFEYIWQNFVEQEEGESKAFEPWEDIQENFLYYEEKLADILK

SEQ ID NO: 213 - protein, 224 aa, Rattus norvegicus
MAQKEEAAEAAAPASQNGDDLENLEDPEKLKELIDLPPFEIVTGVRLPVNFFKFQFRNVEYSSGRNKTFLCYVVEAQSKGGQVQATQGYLEDEHAGAHAEEAFFNTILPAFDPALKYNVTWYVSSSPCAACADRILKTLSKTKNLRLLILVSRLFMWEEPEVQAALKKLKEAGCKLRIMKPQDFEYLWQNFVEQEEGESKAFEPWEDIQENFLYYEEKLADILK

SEQ ID NO: 214 - protein, 208 aa, Petromyzon marinus
MTDAEYVRIHEKLDIYTFKKQFFNNKKSVSHRCYVLFELKRRGERRACFWGYAVNKPQSGTERGIHAEIFSIRKVEEYLRDNPGQFTINWYSSWSPCADCAEKILEWYNQELRGNGHTLKIWACKLYYEKNARNQIGLWNLRDNGVGLNVMVSEHYQCCRKIFIQSSHNQLNENRWLEKTLKRAEKRRSELSFMIQVKILHTTKSPAV

SEQ ID NO: 215 - protein, 381 aa, Homo sapiens
MKPHFRNTVERMYRDTFSYNFYNRPILSRRNTVWLCYEVKTKGPSRPPLDAKIFRGQVYSELKYHPEMRFFHWFSKWRKLHRDQEYEVTWYISWSPCTKCTRDMATFLAEDPKVTLTIFVARLYYFWDPDYQEALRSLCQKRDGPRATMKFNYDEFQHCWSKFVYSQRELFEPWNNLPKYYILLHFMLGEILRHSMDPPTFTFNFNNEPWVRGRHETYLCYEVERMHNDTWVLLNQRRGFLCNQAPHKHGFLEGRHAELCFLDVIPFWKLDLDQDYRVTCFTSWSPCFSCAQEMAKFISKKHVSLCIFTARIYRRQGRCQEGLRTLAEAGAKISFTYSEFKHCWDTFVDHQGCPFQPWDGLDEHSQDLSGRLRAILQNQEN

SEQ ID NO: 216 - protein, 182 aa, Homo sapiens
MDPPTFTFNFNNEPWWGRHETYLCYEVERMHNDTWVLLNQRRGFLCNQAPHKHGFLEGRHAELCFLDVIPFWKLDLDQDYRVTCFTSWSPCFSCAQEMAKFISKNKHVSLCIFTARIYDDQGRCQEGLRTLAEAGAKISFTYSEFKHCWDTFVDHQGCPFQPWDGLDEHSQDLSGRLRAILQ

SEQ ID NO: 217 - protein, 184 aa, Homo sapiens
MDPPTFTFNFNNEPWVRGRHETYLCYEVERMHNDTWVLLNQRRGFLCNQAPHKHGFLEGRHAELCFLDVIPFWKLDLDQDYRVTCFTSWSPCFSCAQEMAKFISKNKHVSLCIFTARIYRRQGRCQEGLRTLAEAGAKISFMTYSEFKHCWDTFVDHQGCPFQPWDGLDEHSQDLSGRLRAILQ

SEQ ID NO: 218 - protein, 367 aa, Homo sapiens
MEPIYEEYLANHGTIVKPYYWLSFSLDCSNCPYHIRTGEEARVSLTEFCQIFGFPYGTTFPQTKHLTFYELKTSSGSLVQKGHASSCTGNYIHPESMLFEMNGYLDSAIYNNDSIRHIILYSNNSPCNEANHCCISKMYNFLITYPGITLSIYFSQLYHTEMDFPASAWNREALRSLASLWPRVVLSPISGGIWHSVLHSFISGVSGSHVFQPILTGRALADRHNAYEINAITGVKPYFTDVLLQTKRNPNTKAQEALESYPLNNAFPGQFFQMPSGQLQPNLPPDLRAPVVFVLVPLRDLPPMHMGQNPNKPRNIVRHLNMPQMSFQETKDLGRLPTGRSVEIVEITEQFASSKEADEKKKKKGKK

SEQ ID NO: 219 - protein, 388 aa, Rattus norvegicus
MEPLYEEYLTHSGTIVKPYYWLSVSLNCTNCPYHIRTGEEARVPYTEFHQTFGFPWSTYPQTKHLTFYELRSSSGNLIQKGLASNCTGSHTHPESMLFERDGYLDSLIFHDSNIRHIILYSNNSPCDEANHCCISKMYNFLMNYPEVTLSVFFSQLYHTENQFPTSAWNREALRGLASLWPQVTLSAISGGIWQSILETFVSGISEGLTAVRPFTAGRTLTDRYNAYEINCITEVKPYFTDALHSWQKENQDQKVWAASENQPLHNTTPAQWQPDMSQDCRTPAVFMLVPYRDLPPIHVNPSPQKPRTVVRHLNTLQLSASKVKALRKSPSGRPVKKEEARKGSTRSQEANETNKSKWKKQTLFIKSNICHLLEREQKKIGILSSWSV

SEQ ID NO: 220 - protein, 363 aa, Macaca fascicularis
MEPTYEEYLANHGTIVKPYYWLSFSLDCSNCPYHIRTGEEARVSLTEFCQIFGFPYGTTYPQTKHLTFYELKTSSGSLVQKGHASSCTGNYIHPESMLFEMNGYLDSAIYNNDSIRHIILYCNNSPCNEANHCCISKVYNFLITYPGITLSIYFSQLYHTEMDFPASAWNREALRSLASLWPRVVLSPISGGIWHSVLHSFVSGVSGSHVFQPILTGRALTDRYNAYEINAITGVKPFFTDVLLHTKRNPNTKAQMALESYPLNNAFPGQSFQMTSGIPPDLRAPVVFVLLPLRDLPPMHMGQDPNKPRNIIRHLNMPQMSFQETKDLERLPTRRSVETVEITERFASSKQAEEKTKKKKGKK

SEQ ID NO: 221 - protein, 224 aa, Petromyzon marinus
MAGYECVRVSEKLDFDTFEFQFENLHYATERHRTYVIFDVKPQSAGGRSRRLWGYIINNPNVCHAELILMSMIDRHLESNPGVYAMTWYMSWSPCANCSSKLNPWLKNLLEEQGHTLTMHFSRIYDRDREGDHRGLRGLKHVSNSFRMGVVGRAEVKECLAEYVEASRRTLTWLDTTESMAAKMRRKLFCILVRCAGMRESGIPLHLFTLQTPLLSGRVVWWRV

SEQ ID NO: 222 - protein, 331 aa, Petromyzon marinus
MELREVVDCALASCVRHEPLSRVAFLRCFAAPSQKPRGTVILFYVEGAGRGVTGGHAVNYNKQGTSIHAEVLLLSAVRAALLRRRRCEDGEEATRGCTLHCYSTYSPCRDCVEYIQEFGASTGVRVVIHCCRLYELDVNRRRSEAEGVLRSLSRLGRDFRLMGPRDAIALLLGGRLANTADGESGASGNAWVTETNVVEPLVDMTGFGDEDLHAQVQRNKQIREAYANYASAVSLMLGELHVDPDKFPFLAEFLAQTSVEPSGTPRETRGRPRGASSRGPEIGRQRPADFERALGAYGLFLHPRIVSREADREEIKRDLIVVMRKHNYQGP

SEQ ID NO: 223 - protein, 209 aa, Petromyzon marinus
MAGDENVRVSEKLDFDTFEFQFENLHYATERHRTYVIFDVKPQSAGGRSRRLWGYIINNPNVCHAELILMSMIDRHLESNPGVYAMTWYMSWSPCANCSSKLNPWLKNLLEEQGHTLMMHFSRIYDRDREGDHRGLRGLKHVSNSFRMGVVGRAEVKECLAEYVEASRRTLTWLDTTESMAAKMRRKLFCILVRCAGMRESGMPLHLFT

SEQ ID NO: 224 - protein, 158 aa, Saccharomyces cerevisiae
MVTGGMASKWDQKGMDIAYEEAALGYKEGGVPIGGCLINNKDGSVLGRGHNMRFQKGSATLHGEISTLENCGRLEGKVYKDTTLYTTLSPCDMCTGAIIMYGIPRCVVGENVNFKSKGEKYLQTRGHEVVVVDDERCKKIMKQFIDERPQDWFEDIGE

SEQ ID NO: 225 - protein, 218 aa, Artificial Sequence
  Description of Artificial Sequence: Synthetic polypeptide
MSSETGPVAVDPTLRRRIEPHEFEVFFDPRELRKETCLLYEINWGGRHSIWRHTSQNTNKHVEVNFIEKFTTERYFCPNTRCSITWFLSWSPCGECSRAITEFLSRYPHVTLFIYIARLYHHADPRNRQGLRDLISSGVTIQIMTEQESGYCWRNFVNYSPSNEAHWPRYPHLWVRGLPPCLNILRRKQPQLTFFTIALQSCHYQRLPPHILWATGLK

SEQ ID NO: 226 - protein, 218 aa, Artificial Sequence
  Description of Artificial Sequence: Synthetic polypeptide
MSSETGPVAVDPTLRRRIEPHEFEVFFDPRELRKETCLLYEINWGGRHSIWRHTSQNTNKHVEVNFIEKFTTERYFCPNTRCSITWFLSWSPCGECSRAITEFLSRYPHVTLFIYIARLYHHADPRNRQGLRDLISSGVTIQIMTEQESGYCWRNFVNYSPSNEAHWPRYPHLWVRLYVLELYCIILGLPPCLNILRRKQPQHYQRLPPHILWATGLK

SEQ ID NO: 227 - protein, 1609 aa, Artificial Sequence
  Description of Artificial Sequence: Synthetic polypeptide
MSEVEFSHEYWMRHALTLAKRARDEREVPVGAVLVLNNRVIGEGWNRAIGLHDPTAHAEIMALRQGGLVMQNYRLIDATLYVTFEPCVMCAGAMIHSRIGRVVFGVRNAKTGAAGSLMDVLHYPGMNHRVEITEGILADECAALLCTFFRMPRQVFNAQKKAQSSTDSGGSSGGSSGSETPGTSESATPESSGGSSGGSEIGKATAKYFFYSNIMNFFKTEITLANGEIRKRPLIETNGETGEIVWDKGRDFATVRKVLSMPQVNIVKKTEVQTGGFSKESILPKRNSDKLIARKKDWDPKKYGGFMQPTVAYSVLVVAKVEKGKSKKLKSVKELLGITIMERSSFEKNPIDFLEAKGYKEVKKDLIIKLPKYSLFELENGRKRMLASAKFLQKGNELALPSKYVNFLYLASHYEKLKGSPEDNEQKQLFVEQHKHYLDEIIEQISEFSKRVILADANLDKVLSAYNKHRDKPIREQAENIIHLFTLTNLGAPRAFKYFDTTIARKEYRSTKEVLDATLIHQSITGLYETRIDLSQLGGDGGSGGSGGSGGSGGSGGSGGMDKKYSIGLAIGTNSVGWAVITDEYKVPSKKFKVLGNTDRHSIKKNLIGALLFDSGETAEATRLKRTARRRYTRRKNRICYLQEIFSNEMAKVDDSFFHRLEESFLVEEDKKHERHPIFGNIVDEVAYHEKYPTIYHLRKKLVDSTDKADLRLIYLALAHMIKFRGHFLIEGDLNPDNSDVDKLFIQLVQTYNQLFEENPINASGVDAKAILSARLSKSRRLENLIAQLPGEKKNGLFGNLIALSLGLTPNFKSNFDLAEDAKLQLSKDTYDDDLDNLLAQIGDQYADLFLAAKNLSDAILLSDILRVNTEITKAPLSASMIKRYDEHHQDLTLLKALVRQQLPEKYKEIFFDQSKNGYAGYIDGGASQEEFYKFIKPILEKMDGTEELLVKLNREDLLRKQRTFDNGSIPHQIHLGELHAILRRQEDFYPFLKDNREKIEKILTFRIPYYVGPLARGNSRFAWMTRKSEETITPWNFEEVVDKGASAQSFIERMTNFDKNLPNEKVLPKHSLLYEYFTVYNELTKVKYVTEGMRKPAFLSGEQKKAIVDLLFKTNRKVTVKQLKEDYFKKIECFDSVEISGVEDRFNASLGTYHDLLKIIKDKDFLDNEENEDILEDIVLTLTLFEDREMIEERLKTYAHLFDDKVMKQLKRRRYTGWGRLSRKLINGIRDKQSGKTILDFLKSDGFANRNFMQLIHDDSLTFKEDIQKAQVSGQGDSLHEHIANLAGSPAIKKGILQTVKVVDELVKVMGRHKPENIVIEMARENQTTQKGQKNSRERMKRIEEGIKELGSQILKEHPVENTQLQNEKLYLYYLQNGRDMYVDQELDINRLSDYDVDHIVPQSFLKDDSIDNKVLTRSDKNRGKSDNVPSEEVVKKMKNYWRQLLNAKLITQRKFDNLTKAERGGLSELDKAGFIKRQLVETRQITKHVAQILDSRMNTKYDENDKLIREVKVITLKSKLVSDFRKDFQFYKVREINNYHHAHDAYLNAVVGTALIKKYPKLESEFVYGDYKVYDVRKMIAKSEQEGADKRTADGSEFESPKKKRKV

SEQ ID NO: 228 - protein, 1807 aa, Artificial Sequence
  Description of Artificial Sequence: Synthetic polypeptide
MSEVEFSHEYWMRHALTLAKRAWDEREVPVGAVLVHNNRVIGEGWNRPIGRHDPTAHAEIMALRQGGLVMQNYRLIDATLYVTLEPCVMCAGAMIHSRIGRVVFGARDAKTGAAGSLMDVLHHPGMNHRVEITEGILADECAALLSDFFRMRRQEIKAQKKAQSSTDGGSSGGSSGSETPGTSESATPESSGGSSGGSMSEVEFSHEYWMRHALTLAKRARDEREVPVGAVLVLNNRVIGEGWNRAIGLHDPTAHAEIMALRQGGLVMQNYRLIDATLYVTFEPCVMCAGAMIHSRIGRVVFGVRNAKTGAAGSLMDVLHYPGMNHRVEITEGILADECAALLCTFFRMPRQVFNAQKKAQSSTDSGGSSGGSSGSETPGTSESATPESSGGSSGGSEIGKATAKYFFYSNIMNFFKTEITLANGEIRKRPLIETNGETGEIVWDKGRDFATVRKVLSMPQVNIVKKTEVQTGGFSKESILPKRNSDKLIARKKDWDPKKYGGFMQPTVAYSVLVVAKVEKGKSKKLKSVKELLGITIMERSSFEKNPIDFLEAKGYKEVKKDLIIKLPKYSLFELENGRKRMLASAKFLQKGNELALPSKYVNFLYLASHYEKLKGSPEDNEQKQLFVEQHKHYLDEIIEQISEFSKRVILADANLDKVLSAYNKHRDKPIREQAENIIHLFTLTNLGAPRAFKYFDTTIARKEYRSTKEVLDATLIHQSITGLYETRIDLSQLGGDGGSGGSGGSGGSGGSGGSGGMDKKYSIGLAIGTNSVGWAVITDEYKVPSKKFKVLGNTDRHSIKKNLIGALLFDSGETAEATRLKRTARRRYTRRKNRICYLQEIFSNEMAKVDDSFFHRLEESFLVEEDKKHERHPIFGNIVDEVAYHEKYPTIYHLRKKLVDSTDKADLRLIYLALAHMIKFRGHFLIEGDLNPDNSDVDKLFIQLVQTYNQLFEENPINASGVDAKAILSARLSKSRRLENLIAQLPGEKKNGLFGNLIALSLGLTPNFKSNFDLAEDAKLQLSKDTYDDDLDNLLAQIGDQYADLFLAAKNLSDAILLSDILRVNTEITKAPLSASMIKRYDEHHQDLTLLKALVRQQLPEKYKEIFFDQSKNGYAGYIDGGASQEEFYKFIKPILEKMDGTEELLVKLNREDLLRKQRTFDNGSIPHQIHLGELHAILRRQEDFYPFLKDNREKIEKILTFRIPYYVGPLARGNSRFAWMTRKSEETITPWNFEEVVDKGASAQSFIERMTNFDKNLPNEKVLPKHSLLYEYFTVYNELTKVKYVTEGMRKPAFLSGEQKKAIVDLLFKTNRKVTVKQLKEDYFKKIECFDSVEISGVEDRFNASLGTYHDLLKIIKDKDFLDNEENEDILEDIVLTLTLFEDREMIEERLKTYAHLFDDKVMKQLKRRRYTGWGRLSRKLINGIRDKQSGKTILDFLKSDGFANRNFMQLIHDDSLTFKEDIQKAQVSGQGDSLHEHIANLAGSPAIKKGILQTVKVVDELVKVMGRHKPENIVIEMARENQTTQKGQKNSRERMKRIEEGIKELGSQILKEHPVENTQLQNEKLYLYYLQNGRDMYVDQELDINRLSDYDVDHIVPQSFLKDDSIDNKVLTRSDKNRGKSDNVPSEEVVKKMKNYWRQLLNAKLITQRKFDNLTKAERGGLSELDKAGFIKRQLVETRQITKHVAQILDSRMNTKYDENDKLIREVKVITLKSKLVSDFRKDFQFYKVREINNYHHAHDAYLNAVVGTALIKKYPKLESEFVYGDYKVYDVRKMIAKSEQEGADKRTADGSEFESPKKKRKV

SEQ ID NO: 229 - protein, 1588 aa, Artificial Sequence
  Description of Artificial Sequence: Synthetic polypeptide
MSEVEFSHEYWMRHALTLAKRARDEREVPVGAVLVLNNRVIGEGWNRAIGLHDPTAHAEIMALRQGGLVMQNYRLIDATLYVTFEPCVMCAGAMIHSRIGRVVFGVRNAKTGAAGSLMDVLHHPGMNHRVEITEGILADECAALLCRFFRMPRRVFNAQKKAQSSTDSGGSSGGSSGSETPGTSESATPESSGGSSGGSDKKYSIGLAIGTNSVGWAVITDEYKVPSKKFKVLGNTDRHSIKKNLIGALLFDSGETAEATRLKRTARRRYTRRKNRICYLQEIFSNEMAKVDDSFFHRLEESFLVEEDKKHERHPIFGNIVDEVAYHEKYPTIYHLRKKLVDSTDKADLRLIYLALAHMIKFRGHFLIEGDLNPDNSDVDKLFIQLVQTYNQLFEENPINASGVDAKAILSARLSKSRRLENLIAQLPGEKKNGLFGNLIALSLGLTPNFKSNFDLAEDAKLQLSKDTYDDDLDNLLAQIGDQYADLFLAAKNLSDAILLSDILRVNTEITKAPLSASMIKRYDEHHQDLTLLKALVRQQLPEKYKEIFFDQSKNGYAGYIDGGASQEEFYKFIKPILEKMDGTEELLVKLNREDLLRKQRTFDNGSIPHQIHLGELHAILRRQEDFYPFLKDNREKIEKILTFRIPYYVGPLARGNSRFAWMTRKSEETITPWNFEEVVDKGASAQSFIERMTNFDKNLPNEKVLPKHSLLYEYFTVYNELTKVKYVTEGMRKPAFLSGEQKKAIVDLLFKTNRKVTVKQLKEDYFKKIECFDSVEISGVEDRFNASLGTYHDLLKIIKDKDFLDNEENEDILEDIVLTLTLFEDREMIEERLKTYAHLFDDKVMKQLKRRRYTGWGRLSRKLINGIRDKQSGKTILDFLKSDGFANRNFMQLIHDDSLTFKEDIQKAQVSGQGDSLHEHIANLAGSPAIKKGILQTVKVVDELVKVMGRHKPENIVIEMARENQTTQKGQKNSRERMKRIEEGIKELGSQILKEHPVENTQLQNEKLYLYYLQNGRDMYVDQELDINRLSDYDVDHIVPQSFLKDDSIDNKVLTRSDKNRGKSDNVPSEEVVKKMKNYWRQLLNAKLITQRKFDNLTKAERGGLSELDKAGFIKRQLVETRQITKHVAQILDSRMNTKYDENDKLIREVKVITLKSKLVSDFRKDFQFYKVREINNYHHAHDAYLNAVVGTALIKKYPKLESEFVYGDYKVYDVRKMIAKSEQEIGKATAKYFFYSNIMNFFKTEITLANGEIRKRPLIETNGETGEIVWDKGRDFATVRKVLSMPQVNIVKKTEVQTGGFSKESILPKRNSDKLIARKKDWDPKKYGGFDSPTVAYSVLVVAKVEKGKSKKLKSVKELLGITIMERSSFEKNPIDFLEAKGYKEVKKDLIIKLPKYSLFELENGRKRMLASAGELQKGNELALPSKYVNFLYLASHYEKLKGSPEDNEQKQLFVEQHKHYLDEIIEQISEFSKRVILADANLDKVLSAYNKHRDKPIREQAENIIHLFTLTNLGAPAAFKYFDTTIDRKRYTSTKEVLDATLIHQSITGLYETRIDLSQLGGDEGADKRTADGSEFESPKKKRKV

SEQ ID NO: 230 - protein, 1786 aa, Artificial Sequence
  Description of Artificial Sequence: Synthetic polypeptide
MSEVEFSHEYWMRHALTLAKRAWDEREVPVGAVLVHNNRVIGEGWNRPIGRHDPTAHAEIMALRQGGLVMQNYRLIDATLYVTLEPCVMCAGAMIHSRIGRVVFGARDAKTGAAGSLMDVLHHPGMNHRVEITEGILADECAALLSDFFRMRRQEIKAQKKAQSSTDSGGSSGGSSGSETPGTSESATPESSGGSSGGSSEVEFSHEYWMRHALTLAKRARDEREVPVGAVLVLNNRVIGEGWNRAIGLHDPTAHAEIMALRQGGLVMQNYRLIDATLYVTFEPCVMCAGAMIHSRIGRVVFGVRNAKTGAAGSLMDVLHHPGMNHRVEITEGILADECAALLCRFFRMPRRVFNAQKKAQSSTDSGGSSGGSSGSETPGTSESATPESSGGSSGGSDKKYSIGLAIGTNSVGWAVITDEYKVPSKKFKVLGNTDRHSIKKNLIGALLFDSGETAEATRLKRTARRRYTRRKNRICYLQEIFSNEMAKVDDSFFHRLEESFLVEEDKKHERHPIFGNIVDEVAYHEKYPTIYHLRKKLVDSTDKADLRLIYLALAHMIKFRGHFLIEGDLNPDNSDVDKLFIQLVQTYNQLFEENPINASGVDAKAILSARLSKSRRLENLIAQLPGEKKNGLFGNLIALSLGLTPNFKSNFDLAEDAKLQLSKDTYDDDLDNLLAQIGDQYADLFLAAKNLSDAILLSDILRVNTEITKAPLSASMIKRYDEHHQDLTLLKALVRQQLPEKYKEIFFDQSKNGYAGYIDGGASQEEFYKFIKPILEKMDGTEELLVKLNREDLLRKQRTFDNGSIPHQIHLGELHAILRRQEDFYPFLKDNREKIEKILTFRIPYYVGPLARGNSRFAWMTRKSEETITPWNFEEVVDKGASAQSFIERMTNFDKNLPNEKVLPKHSLLYEYFTVYNELTKVKYVTEGMRKPAFLSGEQKKAIVDLLFKTNRKVTVKQLKEDYFKKIECFDSVEISGVEDRFNASLGTYHDLLKIIKDKDFLDNEENEDILEDIVLTLTLFEDREMIEERLKTYAHLFDDKVMKQLKRRRYTGWGRLSRKLINGIRDKQSGKTILDFLKSDGFANRNFMQLIHDDSLTFKEDIQKAQVSGQGDSLHEHIANLAGSPAIKKGILQTVKVVDELVKVMGRHKPENIVIEMARENQTTQKGQKNSRERMKRIEEGIKELGSQILKEHPVENTQLQNEKLYLYYLQNGRDMYVDQELDINRLSDYDVDHIVPQSFLKDDSIDNKVLTRSDKNRGKSDNVPSEEVVKKMKNYWRQLLNAKLITQRKFDNLTKAERGGLSELDKAGFIKRQLVETRQITKHVAQILDSRMNTKYDENDKLIREVKVITLKSKLVSDFRKDFQFYKVREINNYHHAHDAYLNAVVGTALIKKYPKLESEFVYGDYKVYDVRKMIAKSEQEIGKATAKYFFYSNIMNFFKTEITLANGEIRKRPLIETNGETGEIVWDKGRDFATVRKVLSMPQVNIVKKTEVQTGGFSKESILPKRNSDKLIARKKDWDPKKYGGFDSPTVAYSVLVVAKVEKGKSKKLKSVKELLGITIMERSSFEKNPIDFLEAKGYKEVKKDLIIKLPKYSLFELENGRKRMLASAGELQKGNELALPSKYVNFLYLASHYEKLKGSPEDNEQKQLFVEQHKHYLDEIIEQISEFSKRVILADANLDKVLSAYNKHRDKPIREQAENIIHLFTLTNLGAPAAFKYFDTTIDRKRYTSTKEVLDATLIHQSITGLYETRIDLSQLGGDEGADKRTADGSEFESPKKKRKV

SEQ ID NO: 231 - protein, 1588 aa, Artificial Sequence
  Description of Artificial Sequence: Synthetic polypeptide
MSEVEFSHEYWMRHALTLAKRARDEREVPVGAVLVLNNRVIGEGWNRAIGLHDPTAHAEIMALRQGGLVMQNYRLYDATLYVTFEPCVMCAGAMIHSRIGRVVFGVRNAKTGAAGSLMDVLHHPGMNHRVEITEGILADECAALLCRFFRMPRRVFNAQKKAQSSTDSGGSSGGSSGSETPGTSESATPESSGGSSGGSDKKYSIGLAIGTNSVGWAVITDEYKVPSKKFKVLGNTDRHSIKKNLIGALLFDSGETAEATRLKRTARRRYTRRKNRICYLQEIFSNEMAKVDDSFFHRLEESFLVEEDKKHERHPIFGNIVDEVAYHEKYPTIYHLRKKLVDSTDKADLRLIYLALAHMIKFRGHFLIEGDLNPDNSDVDKLFIQLVQTYNQLFEENPINASGVDAKAILSARLSKSRRLENLIAQLPGEKKNGLFGNLIALSLGLTPNFKSNFDLAEDAKLQLSKDTYDDDLDNLLAQIGDQYADLFLAAKNLSDAILLSDILRVNTEITKAPLSASMIKRYDEHHQDLTLLKALVRQQLPEKYKEIFFDQSKNGYAGYIDGGASQEEFYKFIKPILEKMDGTEELLVKLNREDLLRKQRTFDNGSIPHQIHLGELHAILRRQEDFYPFLKDNREKIEKILTFRIPYYVGPLARGNSRFAWMTRKSEETITPWNFEEVVDKGASAQSFIERMTNFDKNLPNEKVLPKHSLLYEYFTVYNELTKVKYVTEGMRKPAFLSGEQKKAIVDLLFKTNRKVTVKQLKEDYFKKIECFDSVEISGVEDRFNASLGTYHDLLKIIKDKDFLDNEENEDILEDIVLTLTLFEDREMIEERLKTYAHLFDDKVMKQLKRRRYTGWGRLSRKLINGIRDKQSGKTILDFLKSDGFANRNFMQLIHDDSLTFKEDIQKAQVSGQGDSLHEHIANLAGSPAIKKGILQTVKVVDELVKVMGRHKPENIVIEMARENQTTQKGQKNSRERMKRIEEGIKELGSQILKEHPVENTQLQNEKLYLYYLQNGRDMYVDQELDINRLSDYDVDHIVPQSFLKDDSIDNKVLTRSDKNRGKSDNVPSEEVVKKMKNYWRQLLNAKLITQRKFDNLTKAERGGLSELDKAGFIKRQLVETRQITKHVAQILDSRMNTKYDENDKLIREVKVITLKSKLVSDFRKDFQFYKVREINNYHHAHDAYLNAVVGTALIKKYPKLESEFVYGDYKVYDVRKMIAKSEQEIGKATAKYFFYSNIMNFFKTEITLANGEIRKRPLIETNGETGEIVWDKGRDFATVRKVLSMPQVNIVKKTEVQTGGFSKESILPKRNSDKLIARKKDWDPKKYGGFDSPTVAYSVLVVAKVEKGKSKKLKSVKELLGITIMERSSFEKNPIDFLEAKGYKEVKKDLIIKLPKYSLFELENGRKRMLASAGELQKGNELALPSKYVNFLYLASHYEKLKGSPEDNEQKQLFVEQHKHYLDEIIEQISEFSKRVILADANLDKVLSAYNKHRDKPIREQAENIIHLFTLTNLGAPAAFKYFDTTIDRKRYTSTKEVLDATLIHQSITGLYETRIDLSQLGGDEGADKRTADGSEFESPKKKRKV

SEQ ID NO: 232 - protein, 1786 aa, Artificial Sequence
  Description of Artificial Sequence: Synthetic polypeptide
MSEVEFSHEYWMRHALTLAKRAWDEREVPVGAVLVHNNRVIGEGWNRPIGRHDPTAHAEIMALRQGGLVMQNYRLIDATLYVTLEPCVMCAGAMIHSRIGRVVFGARDAKTGAAGSLMDVLHHPGMNHRVEITEGILADECAALLSDFFRMRRQEIKAQKKAQSSTDSGGSSGGSSGSETPGTSESATPESSGGSSGGSSEVEFSHEYWMRHALTLAKRARDEREVPVGAVLVLNNRVIGEGWNRAIGLHDPTAHAEIMALRQGGLVMQNYRLYDATLYVTFEPCVMCAGAMIHSRIGRVVFGVRNAKTGAAGSLMDVLHHPGMNHRVEITEGILADECAALLCRFFRMPRRVFNAQKKAQSSTDSGGSSGGSSGSETPGTSESATPESSGGSSGGSDKKYSIGLAIGTNSVGWAVITDEYKVPSKKFKVLGNTDRHSIKKNLIGALLFDSGETAEATRLKRTARRRYTRRKNRICYLQEIFSNEMAKVDDSFFHRLEESFLVEEDKKHERHPIFGNIVDEVAYHEKYPTIYHLRKKLVDSTDKADLRLIYLALAHMIKFRGHFLIEGDLNPDNSDVDKLFIQLVQTYNQLFEENPINASGVDAKAILSARLSKSRRLENLIAQLPGEKKNGLFGNLIALSLGLTPNFKSNFDLAEDAKLQLSKDTYDDDLDNLLAQIGDQYADLFLAAKNLSDAILLSDILRVNTEITKAPLSASMIKRYDEHHQDLTLLKALVRQQLPEKYKEIFFDQSKNGYAGYIDGGASQEEFYKFIKPILEKMDGTEELLVKLNREDLLRKQRTFDNGSIPHQIHLGELHAILRRQEDFYPFLKDNREKIEKILTFRIPYYVGPLARGNSRFAWMTRKSEETITPWNFEEVVDKGASAQSFIERMTNFDKNLPNEKVLPKHSLLYEYFTVYNELTKVKYVTEGMRKPAFLSGEQKKAIVDLLFKTNRKVTVKQLKEDYFKKIECFDSVEISGVEDRFNASLGTYHDLLKIIKDKDFLDNEENEDILEDIVLTLTLFEDREMIEERLKTYAHLFDDKVMKQLKRRRYTGWGRLSRKLINGIRDKQSGKTILDFLKSDGFANRNFMQLIHDDSLTFKEDIQKAQVSGQGDSLHEHIANLAGSPAIKKGILQTVKVVDELVKVMGRHKPENIVIEMARENQTTQKGQKNSRERMKRIEEGIKELGSQILKEHPVENTQLQNEKLYLYYLQNGRDMYVDQELDINRLSDYDVDHIVPQSFLKDDSIDNKVLTRSDKNRGKSDNVPSEEVVKKMKNYWRQLLNAKLITQRKFDNLTKAERGGLSELDKAGFIKRQLVETRQITKHVAQILDSRMNTKYDENDKLIREVKVITLKSKLVSDFRKDFQFYKVREINNYHHAHDAYLNAVVGTALIKKYPKLESEFVYGDYKVYDVRKMIAKSEQEIGKATAKYFFYSNIMNFFKTEITLANGEIRKRPLIETNGETGEIVWDKGRDFATVRKVLSMPQVNIVKKTEVQTGGFSKESILPKRNSDKLIARKKDWDPKKYGGFDSPTVAYSVLVVAKVEKGKSKKLKSVKELLGITIMERSSFEKNPIDFLEAKGYKEVKKDLIIKLPKYSLFELENGRKRMLASAGELQKGNELALPSKYVNFLYLASHYEKLKGSPEDNEQKQLFVEQHKHYLDEIIEQISEFSKRVILADANLDKVLSAYNKHRDKPIREQAENIIHLFTLTNLGAPAAFKYFDTTIDRKRYTSTKEVLDATLIHQSITGLYETRIDLSQLGGDEGADKRTADGSEFESPKKKRKV

SEQ ID NO: 233 - protein, 1588 aa, Artificial Sequence
  Description of Artificial Sequence: Synthetic polypeptide
MSEVEFSHEYWMRHALTLAKRARDEREVPVGAVLVLNNRVIGEGWNRAIGLHDPTAHAEIMALRQGGLVMQNYRLIDATLYSTFEPCVMCAGAMIHSRIGRVVFGVRNAKTGAAGSLMDVLHYPGMNHRVEITEGILADECAALLCYFFRMPRRVFNAQKKAQSSTDSGGSSGGSSGSETPGTSESATPESSGGSSGGSDKKYSIGLAIGTNSVGWAVITDEYKVPSKKFKVLGNTDRHSIKKNLIGALLFDSGETAEATRLKRTARRRYTRRKNRICYLQEIFSNEMAKVDDSFFHRLEESFLVEEDKKHERHPIFGNIVDEVAYHEKYPTIYHLRKKLVDSTDKADLRLIYLALAHMIKFRGHFLIEGDLNPDNSDVDKLFIQLVQTYNQLFEENPINASGVDAKAILSARLSKSRRLENLIAQLPGEKKNGLFGNLIALSLGLTPNFKSNFDLAEDAKLQLSKDTYDDDLDNLLAQIGDQYADLFLAAKNLSDAILLSDILRVNTEITKAPLSASMIKRYDEHHQDLTLLKALVRQQLPEKYKEIFFDQSKNGYAGYIDGGASQEEFYKFIKPILEKMDGTEELLVKLNREDLLRKQRTFDNGSIPHQIHLGELHAILRRQEDFYPFLKDNREKIEKILTFRIPYYVGPLARGNSRFAWMTRKSEETITPWNFEEVVDKGASAQSFIERMTNFDKNLPNEKVLPKHSLLYEYFTVYNELTKVKYVTEGMRKPAFLSGEQKKAIVDLLFKTNRKVTVKQLKEDYFKKIECFDSVEISGVEDRFNASLGTYHDLLKIIKDKDFLDNEENEDILEDIVLTLTLFEDREMIEERLKTYAHLFDDKVMKQLKRRRYTGWGRLSRKLINGIRDKQSGKTILDFLKSDGFANRNFMQLIHDDSLTFKEDIQKAQVSGQGDSLHEHIANLAGSPAIKKGILQTVKVVDELVKVMGRHKPENIVIEMARENQTTQKGQKNSRERMKRIEEGIKELGSQILKEHPVENTQLQNEKLYLYYLQNGRDMYVDQELDINRLSDYDVDHIVPQSFLKDDSIDNKVLTRSDKNRGKSDNVPSEEVVKKMKNYWRQLLNAKLITQRKFDNLTKAERGGLSELDKAGFIKRQLVETRQITKHVAQILDSRMNTKYDENDKLIREVKVITLKSKLVSDFRKDFQFYKVREINNYHHAHDAYLNAVVGTALIKKYPKLESEFVYGDYKVYDVRKMIAKSEQEIGKATAKYFFYSNIMNFFKTEITLANGEIRKRPLIETNGETGEIVWDKGRDFATVRKVLSMPQVNIVKKTEVQTGGFSKESILPKRNSDKLIARKKDWDPKKYGGFDSPTVAYSVLVVAKVEKGKSKKLKSVKELLGITIMERSSFEKNPIDFLEAKGYKEVKKDLIIKLPKYSLFELENGRKRMLASAGELQKGNELALPSKYVNFLYLASHYEKLKGSPEDNEQKQLFVEQHKHYLDEIIEQISEFSKRVILADANLDKVLSAYNKHRDKPIREQAENIIHLFTLTNLGAPAAFKYFDTTIDRKRYTSTKEVLDATLIHQSITGLYETRIDLSQLGGDEGADKRTADGSEFESPKKKRKV

SEQ ID NO: 234 - protein, 1786 aa, Artificial Sequence
  Description of Artificial Sequence: Synthetic polypeptide
MSEVEFSHEYWMRHALTLAKRAWDEREVPVGAVLVHNNRVIGEGWNRPIGRHDPTAHAEIMALRQGGLVMQNYRLIDATLYVTLEPCVMCAGAMIHSRIGRVVFGARDAKTGAAGSLMDVLHHPGMNHRVEITEGILADECAALLSDFFRMRRQEIKAQKKAQSSTDSGGSSGGSSGSETPGTSESATPESSGGSSGGSSEVEFSHEYWMRHALTLAKRARDEREVPVGAVLVLNNRVIGEGWNRAIGLHDPTAHAEIMALRQGGLVMQNYRLIDATLYSTFEPCVMCAGAMIHSRIGRVVFGVRNAKTGAAGSLMDVLHYPGMNHRVEITEGILADECAALLCYFFRMPRRVFNAQKKAQSSTDSGGSSGGSSGSETPGTSESATPESSGGSSGGSDKKYSIGLAIGTNSVGWAVITDEYKVPSKKFKVLGNTDRHSIKKNLIGALLFDSGETAEATRLKRTARRRYTRRKNRICYLQEIFSNEMAKVDDSFFHRLEESFLVEEDKKHERHPIFGNIVDEVAYHEKYPTIYHLRKKLVDSTDKADLRLIYLALAHMIKFRGHFLIEGDLNPDNSDVDKLFIQLVQTYNQLFEENPINASGVDAKAILSARLSKSRRLENLIAQLPGEKKNGLFGNLIALSLGLTPNFKSNFDLAEDAKLQLSKDTYDDDLDNLLAQIGDQYADLFLAAKNLSDAILLSDILRVNTEITKAPLSASMIKRYDEHHQDLTLLKALVRQQLPEKYKEIFFDQSKNGYAGYIDGGASQEEFYKFIKPILEKMDGTEELLVKLNREDLLRKQRTFDNGSIPHQIHLGELHAILRRQEDFYPFLKDNREKIEKILTFRIPYYVGPLARGNSRFAWMTRKSEETITPWNFEEVVDKGASAQSFIERMTNFDKNLPNEKVLPKHSLLYEYFTVYNELTKVKYVTEGMRKPAFLSGEQKKAIVDLLFKTNRKVTVKQLKEDYFKKIECFDSVEISGVEDRFNASLGTYHDLLKIIKDKDFLDNEENEDILEDIVLTLTLFEDREMIEERLKTYAHLFDDKVMKQLKRRRYTGWGRLSRKLINGIRDKQSGKTILDFLKSDGFANRNFMQLIHDDSLTFKEDIQKAQVSGQGDSLHEHIANLAGSPAIKKGILQTVKVVDELVKVMGRHKPENIVIEMARENQTTQKGQKNSRERMKRIEEGIKELGSQILKEHPVENTQLQNEKLYLYYLQNGRDMYVDQELDINRLSDYDVDHIVPQSFLKDDSIDNKVLTRSDKNRGKSDNVPSEEVVKKMKNYWRQLLNAKLITQRKFDNLTKAERGGLSELDKAGFIKRQLVETRQITKHVAQILDSRMNTKYDENDKLIREVKVITLKSKLVSDFRKDFQFYKVREINNYHHAHDAYLNAVVGTALIKKYPKLESEFVYGDYKVYDVRKMIAKSEQEIGKATAKYFFYSNIMNFFKTEITLANGEIRKRPLIETNGETGEIVWDKGRDFATVRKVLSMPQVNIVKKTEVQTGGFSKESILPKRNSDKLIARKKDWDPKKYGGFDSPTVAYSVLVVAKVEKGKSKKLKSVKELLGITIMERSSFEKNPIDFLEAKGYKEVKKDLIIKLPKYSLFELENGRKRMLASAGELQKGNELALPSKYVNFLYLASHYEKLKGSPEDNEQKQLFVEQHKHYLDEIIEQISEFSKRVILADANLDKVLSAYNKHRDKPIREQAENIIHLFTLTNLGAPAAFKYFDTTIDRKRYTSTKEVLDATLIHQSITGLYETRIDLSQLGGDEGADKRTADGSEFESPKKKRKV

SEQ ID NO: 235 - protein, 1588 aa, Artificial Sequence
  Description of Artificial Sequence: Synthetic polypeptide
MSEVEFSHEYWMRHALTLAKRARDEREVPVGAVLVLNNRVIGEGWNRAIGLHDPTAHAEIMALRQGGLVMQNYRLYDATLYSTFEPCVMCAGAMIHSRIGRVVFGVRNAKTGAAGSLMDVLHHPGMNHRVEITEGILADECAALLCRFFRMPRRVFNAQKKAQSSTDSGGSSGGSSGSETPGTSESATPESSGGSSGGSDKKYSIGLAIGTNSVGWAVITDEYKVPSKKFKVLGNTDRHSIKKNLIGALLFDSGETAEATRLKRTARRRYTRRKNRICYLQEIFSNEMAKVDDSFFHRLEESFLVEEDKKHERHPIFGNIVDEVAYHEKYPTIYHLRKKLVDSTDKADLRLIYLALAHMIKFRGHFLIEGDLNPDNSDVDKLFIQLVQTYNQLFEENPINASGVDAKAILSARLSKSRRLENLIAQLPGEKKNGLFGNLIALSLGLTPNFKSNFDLAEDAKLQLSKDTYDDDLDNLLAQIGDQYADLFLAAKNLSDAILLSDILRVNTEITKAPLSASMIKRYDEHHQDLTLLKALVRQQLPEKYKEIFFDQSKNGYAGYIDGGASQEEFYKFIKPILEKMDGTEELLVKLNREDLLRKQRTFDNGSIPHQIHLGELHAILRRQEDFYPFLKDNREKIEKILTFRIPYYVGPLARGNSRFAWMTRKSEETITPWNFEEVVDKGASAQSFIERMTNFDKNLPNEKVLPKHSLLYEYFTVYNELTKVKYVTEGMRKPAFLSGEQKKAIVDLLFKTNRKVTVKQLKEDYFKKIECFDSVEISGVEDRFNASLGTYHDLLKIIKDKDFLDNEENEDILEDIVLTLTLFEDREMIEERLKTYAHLFDDKVMKQLKRRRYTGWGRLSRKLINGIRDKQSGKTILDFLKSDGFANRNFMQLIHDDSLTFKEDIQKAQVSGQGDSLHEHIANLAGSPAIKKGILQTVKVVDELVKVMGRHKPENIVIEMARENQTTQKGQKNSRERMKRIEEGIKELGSQILKEHPVENTQLQNEKLYLYYLQNGRDMYVDQELDINRLSDYDVDHIVPQSFLKDDSIDNKVLTRSDKNRGKSDNVPSEEVVKKMKNYWRQLLNAKLITQRKFDNLTKAERGGLSELDKAGFIKRQLVETRQITKHVAQILDSRMNTKYDENDKLIREVKVITLKSKLVSDFRKDFQFYKVREINNYHHAHDAYLNAVVGTALIKKYPKLESEFVYGDYKVYDVRKMIAKSEQEIGKATAKYFFYSNIMNFFKTEITLANGEIRKRPLIETNGETGEIVWDKGRDFATVRKVLSMPQVNIVKKTEVQTGGFSKESILPKRNSDKLIARKKDWDPKKYGGFDSPTVAYSVLVVAKVEKGKSKKLKSVKELLGITIMERSSFEKNPIDFLEAKGYKEVKKDLIIKLPKYSLFELENGRKRMLASAGELQKGNELALPSKYVNFLYLASHYEKLKGSPEDNEQKQLFVEQHKHYLDEIIEQISEFSKRVILADANLDKVLSAYNKHRDKPIREQAENIIHLFTLTNLGAPAAFKYFDTTIDRKRYTSTKEVLDATLIHQSITGLYETRIDLSQLGGDEGADKRTADGSEFESPKKKRKV

SEQ ID NO: 236 - protein, 1786 aa, Artificial Sequence
  Description of Artificial Sequence: Synthetic polypeptide
MSEVEFSHEYWMRHALTLAKRAWDEREVPVGAVLVHNNRVIGEGWNRPIGRHDPTAHAEIMALRQGGLVMQNYRLIDATLYVTLEPCVMCAGAMIHSRIGRVVFGARDAKTGAAGSLMDVLHHPGMNHRVEITEGILADECAALLSDFFRMRRQEIKAQKKAQSSTDSGGSSGGSSGSETPGTSESATPESSGGSSGGSSEVEFSHEYWMRHALTLAKRARDEREVPVGAVLVLNNRVIGEGWNRAIGLHDPTAHAEIMALRQGGLVMQNYRLYDATLYSTFEPCVMCAGAMIHSRIGRVVFGVRNAKTGAAGSLMDVLHHPGMNHRVEITEGILADECAALLCRFFRMPRRVFNAQKKAQSSTDSGGSSGGSSGSETPGTSESATPESSGGSSGGSDKKYSIGLAIGTNSVGWAVITDEYKVPSKKFKVLGNTDRHSIKKNLIGALLFDSGETAEATRLKRTARRRYTRRKNRICYLQEIFSNEMAKVDDSFFHRLEESFLVEEDKKHERHPIFGNIVDEVAYHEKYPTIYHLRKKLVDSTDKADLRLIYLALAHMIKFRGHFLIEGDLNPDNSDVDKLFIQLVQTYNQLFEENPINASGVDAKAILSARLSKSRRLENLIAQLPGEKKNGLFGNLIALSLGLTPNFKSNFDLAEDAKLQLSKDTYDDDLDNLLAQIGDQYADLFLAAKNLSDAILLSDILRVNTEITKAPLSASMIKRYDEHHQDLTLLKALVRQQLPEKYKEIFFDQSKNGYAGYIDGGASQEEFYKFIKPILEKMDGTEELLVKLNREDLLRKQRTFDNGSIPHQIHLGELHAILRRQEDFYPFLKDNREKIEKILTFRIPYYVGPLARGNSRFAWMTRKSEETITPWNFEEVVDKGASAQSFIERMTNFDKNLPNEKVLPKHSLLYEYFTVYNELTKVKYVTEGMRKPAFLSGEQKKAIVDLLFKTNRKVTVKQLKEDYFKKIECFDSVEISGVEDRFNASLGTYHDLLKIIKDKDFLDNEENEDILEDIVLTLTLFEDREMIEERLKTYAHLFDDKVMKQLKRRRYTGWGRLSRKLINGIRDKQSGKTILDFLKSDGFANRNFMQLIHDDSLTFKEDIQKAQVSGQGDSLHEHIANLAGSPAIKKGILQTVKVVDELVKVMGRHKPENIVIEMARENQTTQKGQKNSRERMKRIEEGIKELGSQILKEHPVENTQLQNEKLYLYYLQNGRDMYVDQELDINRLSDYDVDHIVPQSFLKDDSIDNKVLTRSDKNRGKSDNVPSEEVVKKMKNYWRQLLNAKLITQRKFDNLTKAERGGLSELDKAGFIKRQLVETRQITKHVAQILDSRMNTKYDENDKLIREVKVITLKSKLVSDFRKDFQFYKVREINNYHHAHDAYLNAVVGTALIKKYPKLESEFVYGDYKVYDVRKMIAKSEQEIGKATAKYFFYSNIMNFFKTEITLANGEIRKRPLIETNGETGEIVWDKGRDFATVRKVLSMPQVNIVKKTEVQTGGFSKESILPKRNSDKLIARKKDWDPKKYGGFDSPTVAYSVLVVAKVEKGKSKKLKSVKELLGITIMERSSFEKNPIDFLEAKGYKEVKKDLIIKLPKYSLFELENGRKRMLASAGELQKGNELALPSKYVNFLYLASHYEKLKGSPEDNEQKQLFVEQHKHYLDEIIEQISEFSKRVILADANLDKVLSAYNKHRDKPIREQAENIIHLFTLTNLGAPAAFKYFDTTIDRKRYTSTKEVLDATLIHQSITGLYETRIDLSQLGGDEGADKRTADGSEFESPKKKRKV

SEQ ID NO: 237 - protein, 1588 aa, Artificial Sequence
  Description of Artificial Sequence: Synthetic polypeptide
MSEVEFSHEYWMRHALTLAKRARDEREVPVGAVLVLNNRVIGEGWNRAIGLHDPTAHAEIMALRQGGLVMQNYRLIDATLYVTFEPCVMCAGAMIHSRIGRVVFGVRNAKTGAAGSLMDVLHYPGMNHRVEITEGILADECAALLCTFFRMPRQVFNAQKKAQSSTDSGGSSGGSSGSETPGTSESATPESSGGSSGGSDKKYSIGLAIGTNSVGWAVITDEYKVPSKKFKVLGNTDRHSIKKNLIGALLFDSGETAEATRLKRTARRRYTRRKNRICYLQEIFSNEMAKVDDSFFHRLEESFLVEEDKKHERHPIFGNIVDEVAYHEKYPTIYHLRKKLVDSTDKADLRLIYLALAHMIKFRGHFLIEGDLNPDNSDVDKLFIQLVQTYNQLFEENPINASGVDAKAILSARLSKSRRLENLIAQLPGEKKNGLFGNLIALSLGLTPNFKSNFDLAEDAKLQLSKDTYDDDLDNLLAQIGDQYADLFLAAKNLSDAILLSDILRVNTEITKAPLSASMIKRYDEHHQDLTLLKALVRQQLPEKYKEIFFDQSKNGYAGYIDGGASQEEFYKFIKPILEKMDGTEELLVKLNREDLLRKQRTFDNGSIPHQIHLGELHAILRRQEDFYPFLKDNREKIEKILTFRIPYYVGPLARGNSRFAWMTRKSEETITPWNFEEVVDKGASAQSFIERMTNFDKNLPNEKVLPKHSLLYEYFTVYNELTKVKYVTEGMRKPAFLSGEQKKAIVDLLFKTNRKVTVKQLKEDYFKKIECFDSVEISGVEDRFNASLGTYHDLLKIIKDKDFLDNEENEDILEDIVLTLTLFEDREMIEERLKTYAHLFDDKVMKQLKRRRYTGWGRLSRKLINGIRDKQSGKTILDFLKSDGFANRNFMQLIHDDSLTFKEDIQKAQVSGQGDSLHEHIANLAGSPAIKKGILQTVKVVDELVKVMGRHKPENIVIEMARENQTTQKGQKNSRERMKRIEEGIKELGSQILKEHPVENTQLQNEKLYLYYLQNGRDMYVDQELDINRLSDYDVDHIVPQSFLKDDSIDNKVLTRSDKNRGKSDNVPSEEVVKKMKNYWRQLLNAKLITQRKFDNLTKAERGGLSELDKAGFIKRQLVETRQITKHVAQILDSRMNTKYDENDKLIREVKVITLKSKLVSDFRKDFQFYKVREINNYHHAHDAYLNAVVGTALIKKYPKLESEFVYGDYKVYDVRKMIAKSEQEIGKATAKYFFYSNIMNFFKTEITLANGEIRKRPLIETNGETGEIVWDKGRDFATVRKVLSMPQVNIVKKTEVQTGGFSKESILPKRNSDKLIARKKDWDPKKYGGFVSPTVAYSVLVVAKVEKGKSKKLKSVKELLGITIMERSSFEKNPIDFLEAKGYKEVKKDLIIKLPKYSLFELENGRKRMLASARELQKGNELALPSKYVNFLYLASHYEKLKGSPEDNEQKQLFVEQHKHYLDEIIEQISEFSKRVILADANLDKVLSAYNKHRDKPIREQAENIIHLFTLTNLGAPAAFKYFDTTIDRKQYRSTKEVLDATLIHQSITGLYETRIDLSQLGGDEGADKRTADGSEFESPKKKRKV

SEQ ID NO: 238 - protein, 1588 aa, Artificial Sequence
  Description of Artificial Sequence: Synthetic polypeptide
MSEVEFSHEYWMRHALTLAKRARDEREVPVGAVLVLNNRVIGEGWNRAIGLHDPTAHAEIMALRQGGLVMQNYRLIDATLYVTFEPCVMCAGAMIHSRIGRVVFGVRNAKTGAAGSLMDVLHYPGMNHRVEITEGILADECAALLCRFFRMPRQVFNAQKKAQSSTDSGGSSGGSSGSETPGTSESATPESSGGSSGGSDKKYSIGLAIGTNSVGWAVITDEYKVPSKKFKVLGNTDRHSIKKNLIGALLFDSGETAEATRLKRTARRRYTRRKNRICYLQEIFSNEMAKVDDSFFHRLEESFLVEEDKKHERHPIFGNIVDEVAYHEKYPTIYHLRKKLVDSTDKADLRLIYLALAHMIKFRGHFLIEGDLNPDNSDVDKLFIQLVQTYNQLFEENPINASGVDAKAILSARLSKSRRLENLIAQLPGEKKNGLFGNLIALSLGLTPNFKSNFDLAEDAKLQLSKDTYDDDLDNLLAQIGDQYADLFLAAKNLSDAILLSDILRVNTEITKAPLSASMIKRYDEHHQDLTLLKALVRQQLPEKYKEIFFDQSKNGYAGYIDGGASQEEFYKFIKPILEKMDGTEELLVKLNREDLLRKQRTFDNGSIPHQIHLGELHAILRRQEDFYPFLKDNREKIEKILTFRIPYYVGPLARGNSRFAWMTRKSEETITPWNFEEVVDKGASAQSFIERMTNFDKNLPNEKVLPKHSLLYEYFTVYNELTKVKYVTEGMRKPAFLSGEQKKAIVDLLFKTNRKVTVKQLKEDYFKKIECFDSVEISGVEDRFNASLGTYHDLLKIIKDKDFLDNEENEDILEDIVLTLTLFEDREMIEERLKTYAHLFDDKVMKQLKRRRYTGWGRLSRKLINGIRDKQSGKTILDFLKSDGFANRNFMQLIHDDSLTFKEDIQKAQVSGQGDSLHEHIANLAGSPAIKKGILQTVKVVDELVKVMGRHKPENIVIEMARENQTTQKGQKNSRERMKRIEEGIKELGSQILKEHPVENTQLQNEKLYLYYLQNGRDMYVDQELDINRLSDYDVDHIVPQSFLKDDSIDNKVLTRSDKNRGKSDNVPSEEVVKKMKNYWRQLLNAKLITQRKFDNLTKAERGGLSELDKAGFIKRQLVETRQITKHVAQILDSRMNTKYDENDKLIREVKVITLKSKLVSDFRKDFQFYKVREINNYHHAHDAYLNAVVGTALIKKYPKLESEFVYGDYKVYDVRKMIAKSEQEIGKATAKYFFYSNIMNFFKTEITLANGEIRKRPLIETNGETGEIVWDKGRDFATVRKVLSMPQVNIVKKTEVQTGGFSKESILPKRNSDKLIARKKDWDPKKYGGFVSPTVAYSVLVVAKVEKGKSKKLKSVKELLGITIMERSSFEKNPIDFLEAKGYKEVKKDLIIKLPKYSLFELENGRKRMLASARELQKGNELALPSKYVNFLYLASHYEKLKGSPEDNEQKQLFVEQHKHYLDEIIEQISEFSKRVILADANLDKVLSAYNKHRDKPIREQAENIIHLFTLTNLGAPAAFKYFDTTIDRKQYRSTKEVLDATLIHQSITGLYETRIDLSQLGGDEGADKRTADGSEFESPKKKRKV

SEQ ID NO: 239 - protein, 1588 aa, Artificial Sequence
  Description of Artificial Sequence: Synthetic polypeptide
MSEVEFSHEYWMRHALTLAKRARDEREVPVGAVLVLNNRVIGEGWNRAIGLHDPTAHAEIMALRQGGLVMQNYRLIDATLYVTFEPCVMCAGAMIHSRIGRVVFGVRNAKTGAAGSLMDVLHYPGMNHRVEITEGILADECAALLCYFFRMPRSVFNAQKKAQSSTDSGGSSGGSSGSETPGTSESATPESSGGSSGGSDKKYSIGLAIGTNSVGWAVITDEYKVPSKKFKVLGNTDRHSIKKNLIGALLFDSGETAEATRLKRTARRRYTRRKNRICYLQEIFSNEMAKVDDSFFHRLEESFLVEEDKKHERHPIFGNIVDEVAYHEKYPTIYHLRKKLVDSTDKADLRLIYLALAHMIKFRGHFLIEGDLNPDNSDVDKLFIQLVQTYNQLFEENPINASGVDAKAILSARLSKSRRLENLIAQLPGEKKNGLFGNLIALSLGLTPNFKSNFDLAEDAKLQLSKDTYDDDLDNLLAQIGDQYADLFLAAKNLSDAILLSDILRVNTEITKAPLSASMIKRYDEHHQDLTLLKALVRQQLPEKYKEIFFDQSKNGYAGYIDGGASQEEFYKFIKPILEKMDGTEELLVKLNREDLLRKQRTFDNGSIPHQIHLGELHAILRRQEDFYPFLKDNREKIEKILTFRIPYYVGPLARGNSRFAWMTRKSEETITPWNFEEVVDKGASAQSFIERMTNFDKNLPNEKVLPKHSLLYEYFTVYNELTKVKYVTEGMRKPAFLSGEQKKAIVDLLFKTNRKVTVKQLKEDYFKKIECFDSVEISGVEDRFNASLGTYHDLLKIIKDKDFLDNEENEDILEDIVLTLTLFEDREMIEERLKTYAHLFDDKVMKQLKRRRYTGWGRLSRKLINGIRDKQSGKTILDFLKSDGFANRNFMQLIHDDSLTFKEDIQKAQVSGQGDSLHEHIANLAGSPAIKKGILQTVKVVDELVKVMGRHKPENIVIEMARENQTTQKGQKNSRERMKRIEEGIKELGSQILKEHPVENTQLQNEKLYLYYLQNGRDMYVDQELDINRLSDYDVDHIVPQSFLKDDSIDNKVLTRSDKNRGKSDNVPSEEVVKKMKNYWRQLLNAKLITQRKFDNLTKAERGGLSELDKAGFIKRQLVETRQITKHVAQILDSRMNTKYDENDKLIREVKVITLKSKLVSDFRKDFQFYKVREINNYHHAHDAYLNAVVGTALIKKYPKLESEFVYGDYKVYDVRKMIAKSEQEIGKATAKYFFYSNIMNFFKTEITLANGEIRKRPLIETNGETGEIVWDKGRDFATVRKVLSMPQVNIVKKTEVQTGGFSKESILPKRNSDKLIARKKDWDPKKYGGFVSPTVAYSVLVVAKVEKGKSKKLKSVKELLGITIMERSSFEKNPIDFLEAKGYKEVKKDLIIKLPKYSLFELENGRKRMLASARELQKGNELALPSKYVNFLYLASHYEKLKGSPEDNEQKQLFVEQHKHYLDEIIEQISEFSKRVILADANLDKVLSAYNKHRDKPIREQAENIIHLFTLTNLGAPAAFKYFDTTIDRKQYRSTKEVLDATLIHQSITGLYETRIDLSQLGGDEGADKRTADGSEFESPKKKRKV

SEQ ID NO: 240 - protein, 1588 aa, Artificial Sequence
  Description of Artificial Sequence: Synthetic polypeptide
MSEVEFSHEYWMRHALTLAKRARDEREVPVGAVLVLNNRVIGEGWNRAIGLHDPTAHAEIMALRQGGLVMQNYRLIDATLYVTFEPCVMCAGAMIHSRIGRVVFGVRNAKTGAAGSLMDVLHHPGMNHRVEITEGILADECAALLCYFFRMPRQVFNAQKKAQSSTDSGGSSGGSSGSETPGTSESATPESSGGSSGGSDKKYSIGLAIGTNSVGWAVITDEYKVPSKKFKVLGNTDRHSIKKNLIGALLFDSGETAEATRLKRTARRRYTRRKNRICYLQEIFSNEMAKVDDSFFHRLEESFLVEEDKKHERHPIFGNIVDEVAYHEKYPTIYHLRKKLVDSTDKADLRLIYLALAHMIKFRGHFLIEGDLNPDNSDVDKLFIQLVQTYNQLFEENPINASGVDAKAILSARLSKSRRLENLIAQLPGEKKNGLFGNLIALSLGLTPNFKSNFDLAEDAKLQLSKDTYDDDLDNLLAQIGDQYADLFLAAKNLSDAILLSDILRVNTEITKAPLSASMIKRYDEHHQDLTLLKALVRQQLPEKYKEIFFDQSKNGYAGYIDGGASQEEFYKFIKPILEKMDGTEELLVKLNREDLLRKQRTFDNGSIPHQIHLGELHAILRRQEDFYPFLKDNREKIEKILTFRIPYYVGPLARGNSRFAWMTRKSEETITPWNFEEVVDKGASAQSFIERMTNFDKNLPNEKVLPKHSLLYEYFTVYNELTKVKYVTEGMRKPAFLSGEQKKAIVDLLFKTNRKVTVKQLKEDYFKKIECFDSVEISGVEDRFNASLGTYHDLLKIIKDKDFLDNEENEDILEDIVLTLTLFEDREMIEERLKTYAHLFDDKVMKQLKRRRYTGWGRLSRKLINGIRDKQSGKTILDFLKSDGFANRNFMQLIHDDSLTFKEDIQKAQVSGQGDSLHEHIANLAGSPAIKKGILQTVKVVDELVKVMGRHKPENIVIEMARENQTTQKGQKNSRERMKRIEEGIKELGSQILKEHPVENTQLQNEKLYLYYLQNGRDMYVDQELDINRLSDYDVDHIVPQSFLKDDSIDNKVLTRSDKNRGKSDNVPSEEVVKKMKNYWRQLLNAKLITQRKFDNLTKAERGGLSELDKAGFIKRQLVETRQITKHVAQILDSRMNTKYDENDKLIREVKVITLKSKLVSDFRKDFQFYKVREINNYHHAHDAYLNAVVGTALIKKYPKLESEFVYGDYKVYDVRKMIAKSEQEIGKATAKYFFYSNIMNFFKTEITLANGEIRKRPLIETNGETGEIVWDKGRDFATVRKVLSMPQVNIVKKTEVQTGGFSKESILPKRNSDKLIARKKDWDPKKYGGFVSPTVAYSVLVVAKVEKGKSKKLKSVKELLGITIMERSSFEKNPIDFLEAKGYKEVKKDLIIKLPKYSLFELENGRKRMLASARELQKGNELALPSKYVNFLYLASHYEKLKGSPEDNEQKQLFVEQHKHYLDEIIEQISEFSKRVILADANLDKVLSAYNKHRDKPIREQAENIIHLFTLTNLGAPAAFKYFDTTIDRKQYRSTKEVLDATLIHQSITGLYETRIDLSQLGGDEGADKRTADGSEFESPKKKRKV

SEQ ID NO: 241 - protein, 1588 aa, Artificial Sequence
  Description of Artificial Sequence: Synthetic polypeptide
MSEVEFSHEYWMRHALTLAKRARDEREVPVGAVLVLNNRVIGEGWNRAIGLHDPTAHAEIMALRQGGLVMQNYRLIDATLYSTFEPCVMCAGAMIHSRIGRVVFGVRNAKTGAAGSLMDVLHYPGMNHRVEITEGILADECAALLCYFFRMPRQVFNAQKKAQSSTDSGGSSGGSSGSETPGTSESATPESSGGSSGGSDKKYSIGLAIGTNSVGWAVITDEYKVPSKKFKVLGNTDRHSIKKNLIGALLFDSGETAEATRLKRTARRRYTRRKNRICYLQEIFSNEMAKVDDSFFHRLEESFLVEEDKKHERHPIFGNIVDEVAYHEKYPTIYHLRKKLVDSTDKADLRLIYLALAHMIKFRGHFLIEGDLNPDNSDVDKLFIQLVQTYNQLFEENPINASGVDAKAILSARLSKSRRLENLIAQLPGEKKNGLFGNLIALSLGLTPNFKSNFDLAEDAKLQLSKDTYDDDLDNLLAQIGDQYADLFLAAKNLSDAILLSDILRVNTEITKAPLSASMIKRYDEHHQDLTLLKALVRQQLPEKYKEIFFDQSKNGYAGYIDGGASQEEFYKFIKPILEKMDGTEELLVKLNREDLLRKQRTFDNGSIPHQIHLGELHAILRRQEDFYPFLKDNREKIEKILTFRIPYYVGPLARGNSRFAWMTRKSEETITPWNFEEVVDKGASAQSFIERMTNFDKNLPNEKVLPKHSLLYEYFTVYNELTKVKYVTEGMRKPAFLSGEQKKAIVDLLFKTNRKVTVKQLKEDYFKKIECFDSVEISGVEDRFNASLGTYHDLLKIIKDKDFLDNEENEDILEDIVLTLTLFEDREMIEERLKTYAHLFDDKVMKQLKRRRYTGWGRLSRKLINGIRDKQSGKTILDFLKSDGFANRNFMQLIHDDSLTFKEDIQKAQVSGQGDSLHEHIANLAGSPAIKKGILQTVKVVDELVKVMGRHKPENIVIEMARENQTTQKGQKNSRERMKRIEEGIKELGSQILKEHPVENTQLQNEKLYLYYLQNGRDMYVDQELDINRLSDYDVDHIVPQSFLKDDSIDNKVLTRSDKNRGKSDNVPSEEVVKKMKNYWRQLLNAKLITQRKFDNLTKAERGGLSELDKAGFIKRQLVETRQITKHVAQILDSRMNTKYDENDKLIREVKVITLKSKLVSDFRKDFQFYKVREINNYHHAHDAYLNAVVGTALIKKYPKLESEFVYGDYKVYDVRKMIAKSEQEIGKATAKYFFYSNIMNFFKTEITLANGEIRKRPLIETNGETGEIVWDKGRDFATVRKVLSMPQVNIVKKTEVQTGGFSKESILPKRNSDKLIARKKDWDPKKYGGFVSPTVAYSVLVVAKVEKGKSKKLKSVKELLGITIMERSSFEKNPIDFLEAKGYKEVKKDLIIKLPKYSLFELENGRKRMLASARELQKGNELALPSKYVNFLYLASHYEKLKGSPEDNEQKQLFVEQHKHYLDEIIEQISEFSKRVILADANLDKVLSAYNKHRDKPIREQAENIIHLFTLTNLGAPAAFKYFDTTIDRKQYRSTKEVLDATLIHQSITGLYETRIDLSQLGGDEGADKRTADGSEFESPKKKRKV

SEQ ID NO: 242 - protein, 1588 aa, Artificial Sequence
  Description of Artificial Sequence: Synthetic polypeptide
MSEVEFSHEYWMRHALTLAKRARDEREVPVGAVLVLNNRVIGEGWNRAIGLHDPTAHAEIMALRQGGLVMQNYRLIDATLYVTFEPCVMCAGAMIHSRIGRVVFGVRNAKTGAAGSLMDVLHYPGMNHRVEITEGILADECAALLCYFFRMPRQVFNAQKKAQSSRDSGGSSGGSSGSETPGTSESATPESSGGSSGGSDKKYSIGLAIGTNSVGWAVITDEYKVPSKKFKVLGNTDRHSIKKNLIGALLFDSGETAEATRLKRTARRRYTRRKNRICYLQEIFSNEMAKVDDSFFHRLEESFLVEEDKKHERHPIFGNIVDEVAYHEKYPTIYHLRKKLVDSTDKADLRLIYLALAHMIKFRGHFLIEGDLNPDNSDVDKLFIQLVQTYNQLFEENPINASGVDAKAILSARLSKSRRLENLIAQLPGEKKNGLFGNLIALSLGLTPNFKSNFDLAEDAKLQLSKDTYDDDLDNLLAQIGDQYADLFLAAKNLSDAILLSDILRVNTEITKAPLSASMIKRYDEHHQDLTLLKALVRQQLPEKYKEIFFDQSKNGYAGYIDGGASQEEFYKFIKPILEKMDGTEELLVKLNREDLLRKQRTFDNGSIPHQIHLGELHAILRRQEDFYPFLKDNREKIEKILTFRIPYYVGPLARGNSRFAWMTRKSEETITPWNFEEVVDKGASAQSFIERMTNFDKNLPNEKVLPKHSLLYEYFTVYNELTKVKYVTEGMRKPAFLSGEQKKAIVDLLFKTNRKVTVKQLKEDYFKKIECFDSVEISGVEDRFNASLGTYHDLLKIIKDKDFLDNEENEDILEDIVLTLTLFEDREMIEERLKTYAHLFDDKVMKQLKRRRYTGWGRLSRKLINGIRDKQSGKTILDFLKSDGFANRNFMQLIHDDSLTFKEDIQKAQVSGQGDSLHEHIANLAGSPAIKKGILQTVKVVDELVKVMGRHKPENIVIEMARENQTTQKGQKNSRERMKRIEEGIKELGSQILKEHPVENTQLQNEKLYLYYLQNGRDMYVDQELDINRLSDYDVDHIVPQSFLKDDSIDNKVLTRSDKNRGKSDNVPSEEVVKKMKNYWRQLLNAKLITQRKFDNLTKAERGGLSELDKAGFIKRQLVETRQITKHVAQILDSRMNTKYDENDKLIREVKVITLKSKLVSDFRKDFQFYKVREINNYHHAHDAYLNAVVGTALIKKYPKLESEFVYGDYKVYDVRKMIAKSEQEIGKATAKYFFYSNIMNFFKTEITLANGEIRKRPLIETNGETGEIVWDKGRDFATVRKVLSMPQVNIVKKTEVQTGGFSKESILPKRNSDKLIARKKDWDPKKYGGFVSPTVAYSVLVVAKVEKGKSKKLKSVKELLGITIMERSSFEKNPIDFLEAKGYKEVKKDLIIKLPKYSLFELENGRKRMLASARELQKGNELALPSKYVNFLYLASHYEKLKGSPEDNEQKQLFVEQHKHYLDEIIEQISEFSKRVILADANLDKVLSAYNKHRDKPIREQAENIIHLFTLTNLGAPAAFKYFDTTIDRKQYRSTKEVLDATLIHQSITGLYETRIDLSQLGGDEGADKRTADGSEFESPKKKRKV

SEQ ID NO: 243 - protein, 1588 aa, Artificial Sequence
  Description of Artificial Sequence: Synthetic polypeptide
MSEVEFSHEYWMRHALTLAKRARDEREVPVGAVLVLNNRVIGEGWNRAIGLHDPTAHAEIMALRQGGLVMQNYRLIDATLYVTFEPCVMCAGAMIHSRIGRVVFGVRNAKTGAAGSLMDVLHYPGMNHRVEITEGILADECAALLCYFFRMPRRVFNAQKKAQSSTDSGGSSGGSSGSETPGTSESATPESSGGSSGGSDKKYSIGLAIGTNSVGWAVITDEYKVPSKKFKVLGNTDRHSIKKNLIGALLFDSGETAEATRLKRTARRRYTRRKNRICYLQEIFSNEMAKVDDSFFHRLEESFLVEEDKKHERHPIFGNIVDEVAYHEKYPTIYHLRKKLVDSTDKADLRLIYLALAHMIKFRGHFLIEGDLNPDNSDVDKLFIQLVQTYNQLFEENPINASGVDAKAILSARLSKSRRLENLIAQLPGEKKNGLFGNLIALSLGLTPNFKSNFDLAEDAKLQLSKDTYDDDLDNLLAQIGDQYADLFLAAKNLSDAILLSDILRVNTEITKAPLSASMIKRYDEHHQDLTLLKALVRQQLPEKYKEIFFDQSKNGYAGYIDGGASQEEFYKFIKPILEKMDGTEELLVKLNREDLLRKQRTFDNGSIPHQIHLGELHAILRRQEDFYPFLKDNREKIEKILTFRIPYYVGPLARGNSRFAWMTRKSEETITPWNFEEVVDKGASAQSFIERMTNFDKNLPNEKVLPKHSLLYEYFTVYNELTKVKYVTEGMRKPAFLSGEQKKAIVDLLFKTNRKVTVKQLKEDYFKKIECFDSVEISGVEDRFNASLGTYHDLLKIIKDKDFLDNEENEDILEDIVLTLTLFEDREMIEERLKTYAHLFDDKVMKQLKRRRYTGWGRLSRKLINGIRDKQSGKTILDFLKSDGFANRNFMQLIHDDSLTFKEDIQKAQVSGQGDSLHEHIANLAGSPAIKKGILQTVKVVDELVKVMGRHKPENIVIEMARENQTTQKGQKNSRERMKRIEEGIKELGSQILKEHPVENTQLQNEKLYLYYLQNGRDMYVDQELDINRLSDYDVDHIVPQSFLKDDSIDNKVLTRSDKNRGKSDNVPSEEVVKKMKNYWRQLLNAKLITQRKFDNLTKAERGGLSELDKAGFIKRQLVETRQITKHVAQILDSRMNTKYDENDKLIREVKVITLKSKLVSDFRKDFQFYKVREINNYHHAHDAYLNAVVGTALIKKYPKLESEFVYGDYKVYDVRKMIAKSEQEIGKATAKYFFYSNIMNFFKTEITLANGEIRKRPLIETNGETGEIVWDKGRDFATVRKVLSMPQVNIVKKTEVQTGGFSKESILPKRNSDKLIARKKDWDPKKYGGFVSPTVAYSVLVVAKVEKGKSKKLKSVKELLGITIMERSSFEKNPIDFLEAKGYKEVKKDLIIKLPKYSLFELENGRKRMLASARELQKGNELALPSKYVNFLYLASHYEKLKGSPEDNEQKQLFVEQHKHYLDEIIEQISEFSKRVILADANLDKVLSAYNKHRDKPIREQAENIIHLFTLTNLGAPAAFKYFDTTIDRKQYRSTKEVLDATLIHQSITGLYETRIDLSQLGGDEGADKRTADGSEFESPKKKRKV

SEQ ID NO: 244 - protein, 1588 aa, Artificial Sequence
  Description of Artificial Sequence: Synthetic polypeptide
MSEVEFSHEYWMRHALTLAKRARDEREVPVGAVLVLNNRVIGEGWNRAIGLHDPTAHAEIMALRQGGLVMQNYRLIDATLYVTFEPCVMCAGAMIHSRIGRVVFGVRNAKTGAAGSLMDVLHHPGMNHRVEITEGILADECAALLCRFFRMPRRVFNAQKKAQSSTDSGGSSGGSSGSETPGTSESATPESSGGSSGGSDKKYSIGLAIGTNSVGWAVITDEYKVPSKKFKVLGNTDRHSIKKNLIGALLFDSGETAEATRLKRTARRRYTRRKNRICYLQEIFSNEMAKVDDSFFHRLEESFLVEEDKKHERHPIFGNIVDEVAYHEKYPTIYHLRKKLVDSTDKADLRLIYLALAHMIKFRGHFLIEGDLNPDNSDVDKLFIQLVQTYNQLFEENPINASGVDAKAILSARLSKSRRLENLIAQLPGEKKNGLFGNLIALSLGLTPNFKSNFDLAEDAKLQLSKDTYDDDLDNLLAQIGDQYADLFLAAKNLSDAILLSDILRVNTEITKAPLSASMIKRYDEHHQDLTLLKALVRQQLPEKYKEIFFDQSKNGYAGYIDGGASQEEFYKFIKPILEKMDGTEELLVKLNREDLLRKQRTFDNGSIPHQIHLGELHAILRRQEDFYPFLKDNREKIEKILTFRIPYYVGPLARGNSRFAWMTRKSEETITPWNFEEVVDKGASAQSFIERMTNFDKNLPNEKVLPKHSLLYEYFTVYNELTKVKYVTEGMRKPAFLSGEQKKAIVDLLFKTNRKVTVKQLKEDYFKKIECFDSVEISGVEDRFNASLGTYHDLLKIIKDKDFLDNEENEDILEDIVLTLTLFEDREMIEERLKTYAHLFDDKVMKQLKRRRYTGWGRLSRKLINGIRDKQSGKTILDFLKSDGFANRNFMQLIHDDSLTFKEDIQKAQVSGQGDSLHEHIANLAGSPAIKKGILQTVKVVDELVKVMGRHKPENIVIEMARENQTTQKGQKNSRERMKRIEEGIKELGSQILKEHPVENTQLQNEKLYLYYLQNGRDMYVDQELDINRLSDYDVDHIVPQSFLKDDSIDNKVLTRSDKNRGKSDNVPSEEVVKKMKNYWRQLLNAKLITQRKFDNLTKAERGGLSELDKAGFIKRQLVETRQITKHVAQILDSRMNTKYDENDKLIREVKVITLKSKLVSDFRKDFQFYKVREINNYHHAHDAYLNAVVGTALIKKYPKLESEFVYGDYKVYDVRKMIAKSEQEIGKATAKYFFYSNIMNFFKTEITLANGEIRKRPLIETNGETGEIVWDKGRDFATVRKVLSMPQVNIVKKTEVQTGGFSKESILPKRNSDKLIARKKDWDPKKYGGFVSPTVAYSVLVVAKVEKGKSKKLKSVKELLGITIMERSSFEKNPIDFLEAKGYKEVKKDLIIKLPKYSLFELENGRKRMLASARELQKGNELALPSKYVNFLYLASHYEKLKGSPEDNEQKQLFVEQHKHYLDEIIEQISEFSKRVILADANLDKVLSAYNKHRDKPIREQAENIIHLFTLTNLGAPAAFKYFDTTIDRKQYRSTKEVLDATLIHQSITGLYETRIDLSQLGGDEGADKRTADGSEFESPKKKRKV

SEQ ID NO: 245 - protein, 1588 aa, Artificial Sequence
  Description of Artificial Sequence: Synthetic polypeptide
MSEVEFSHEYWMRHALTLAKRARDEREVPVGAVLVLNNRVIGEGWNRAIGLHDPTAHAEIMALRQGGLVMQNYRLYDATLYVTFEPCVMCAGAMIHSRIGRVVFGVRNAKTGAAGSLMDVLHYPGMNHRVEITEGILADECAALLCRFFRMPRRVFNAQKKAQSSTDSGGSSGGSSGSETPGTSESATPESSGGSSGGSDKKYSIGLAIGTNSVGWAVITDEYKVPSKKFKVLGNTDRHSIKKNLIGALLFDSGETAEATRLKRTARRRYTRRKNRICYLQEIFSNEMAKVDDSFFHRLEESFLVEEDKKHERHPIFGNIVDEVAYHEKYPTIYHLRKKLVDSTDKADLRLIYLALAHMIKFRGHFLIEGDLNPDNSDVDKLFIQLVQTYNQLFEENPINASGVDAKAILSARLSKSRRLENLIAQLPGEKKNGLFGNLIALSLGLTPNFKSNFDLAEDAKLQLSKDTYDDDLDNLLAQIGDQYADLFLAAKNLSDAILLSDILRVNTEITKAPLSASMIKRYDEHHQDLTLLKALVRQQLPEKYKEIFFDQSKNGYAGYIDGGASQEEFYKFIKPILEKMDGTEELLVKLNREDLLRKQRTFDNGSIPHQIHLGELHAILRRQEDFYPFLKDNREKIEKILTFRIPYYVGPLARGNSRFAWMTRKSEETITPWNFEEVVDKGASAQSFIERMTNFDKNLPNEKVLPKHSLLYEYFTVYNELTKVKYVTEGMRKPAFLSGEQKKAIVDLLFKTNRKVTVKQLKEDYFKKIECFDSVEISGVEDRFNASLGTYHDLLKIIKDKDFLDNEENEDILEDIVLTLTLFEDREMIEERLKTYAHLFDDKVMKQLKRRRYTGWGRLSRKLINGIRDKQSGKTILDFLKSDGFANRNFMQLIHDDSLTFKEDIQKAQVSGQGDSLHEHIANLAGSPAIKKGILQTVKVVDELVKVMGRHKPENIVIEMARENQTTQKGQKNSRERMKRIEEGIKELGSQILKEHPVENTQLQNEKLYLYYLQNGRDMYVDQELDINRLSDYDVDHIVPQSFLKDDSIDNKVLTRSDKNRGKSDNVPSEEVVKKMKNYWRQLLNAKLITQRKFDNLTKAERGGLSELDKAGFIKRQLVETRQITKHVAQILDSRMNTKYDENDKLIREVKVITLKSKLVSDFRKDFQFYKVREINNYHHAHDAYLNAVVGTALIKKYPKLESEFVYGDYKVYDVRKMIAKSEQEIGKATAKYFFYSNIMNFFKTEITLANGEIRKRPLIETNGETGEIVWDKGRDFATVRKVLSMPQVNIVKKTEVQTGGFSKESILPKRNSDKLIARKKDWDPKKYGGFVSPTVAYSVLVVAKVEKGKSKKLKSVKELLGITIMERSSFEKNPIDFLEAKGYKEVKKDLIIKLPKYSLFELENGRKRMLASARELQKGNELALPSKYVNFLYLASHYEKLKGSPEDNEQKQLFVEQHKHYLDEIIEQISEFSKRVILADANLDKVLSAYNKHRDKPIREQAENIIHLFTLTNLGAPAAFKYFDTTIDRKQYRSTKEVLDATLIHQSITGLYETRIDLSQLGGDEGADKRTADGSEFESPKKKRKV

SEQ ID NO: 246 - protein, 1588 aa, Artificial Sequence
  Description of Artificial Sequence: Synthetic polypeptide
MSEVEFSHEYWMRHALTLAKRARDEREVPVGAVLVLNNRVIGEGWNRAIGLHDPTAHAEIMALRQGGLVMQNYRLIDATLYVTFEPCVMCAGAMIHSRIGRVVFGVRNAKTGAAGSLMDVLHYPGMNHRVEITEGILADECAALLCRFFRMPRRVFNAQKKAQSSRDSGGSSGGSSGSETPGTSESATPESSGGSSGGSDKKYSIGLAIGTNSVGWAVITDEYKVPSKKFKVLGNTDRHSIKKNLIGALLFDSGETAEATRLKRTARRRYTRRKNRICYLQEIFSNEMAKVDDSFFHRLEESFLVEEDKKHERHPIFGNIVDEVAYHEKYPTIYHLRKKLVDSTDKADLRLIYLALAHMIKFRGHFLIEGDLNPDNSDVDKLFIQLVQTYNQLFEENPINASGVDAKAILSARLSKSRRLENLIAQLPGEKKNGLFGNLIALSLGLTPNFKSNFDLAEDAKLQLSKDTYDDDLDNLLAQIGDQYADLFLAAKNLSDAILLSDILRVNTEITKAPLSASMIKRYDEHHQDLTLLKALVRQQLPEKYKEIFFDQSKNGYAGYIDGGASQEEFYKFIKPILEKMDGTEELLVKLNREDLLRKQRTFDNGSIPHQIHLGELHAILRRQEDFYPFLKDNREKIEKILTFRIPYYVGPLARGNSRFAWMTRKSEETITPWNFEEVVDKGASAQSFIERMTNFDKNLPNEKVLPKHSLLYEYFTVYNELTKVKYVTEGMRKPAFLSGEQKKAIVDLLFKTNRKVTVKQLKEDYFKKIECFDSVEISGVEDRFNASLGTYHDLLKIIKDKDFLDNEENEDILEDIVLTLTLFEDREMIEERLKTYAHLFDDKVMKQLKRRRYTGWGRLSRKLINGIRDKQSGKTILDFLKSDGFANRNFMQLIHDDSLTFKEDIQKAQVSGQGDSLHEHIANLAGSPAIKKGILQTVKVVDELVKVMGRHKPENIVIEMARENQTTQKGQKNSRERMKRIEEGIKELGSQILKEHPVENTQLQNEKLYLYYLQNGRDMYVDQELDINRLSDYDVDHIVPQSFLKDDSIDNKVLTRSDKNRGKSDNVPSEEVVKKMKNYWRQLLNAKLITQRKFDNLTKAERGGLSELDKAGFIKRQLVETRQITKHVAQILDSRMNTKYDENDKLIREVKVITLKSKLVSDFRKDFQFYKVREINNYHHAHDAYLNAVVGTALIKKYPKLESEFVYGDYKVYDVRKMIAKSEQEIGKATAKYFFYSNIMNFFKTEITLANGEIRKRPLIETNGETGEIVWDKGRDFATVRKVLSMPQVNIVKKTEVQTGGFSKESILPKRNSDKLIARKKDWDPKKYGGFVSPTVAYSVLVVAKVEKGKSKKLKSVKELLGITIMERSSFEKNPIDFLEAKGYKEVKKDLIIKLPKYSLFELENGRKRMLASARELQKGNELALPSKYVNFLYLASHYEKLKGSPEDNEQKQLFVEQHKHYLDEIIEQISEFSKRVILADANLDKVLSAYNKHRDKPIREQAENIIHLFTLTNLGAPAAFKYFDTTIDRKQYRSTKEVLDATLIHQSITGLYETRIDLSQLGGDEGADKRTADGSEFESPKKKRKV

SEQ ID NO: 247 - protein, 1588 aa, Artificial Sequence
  Description of Artificial Sequence: Synthetic polypeptide
MSEVEFSHEYWMRHALTLAKRARDEREVPVGAVLVLNNRVIGEGWNRAIGLHDPTAHAEIMALRQGGLVMQNYRLIDATLYVTFEPCVMCAGAMIHSRIGRVVFGVRNAKTGAAGSLMDVLHYPGMNHRVEITEGILADECAALLCTFFRMPRRVFNAQKKAQSSTDSGGSSGGSSGSETPGTSESATPESSGGSSGGSDKKYSIGLAIGTNSVGWAVITDEYKVPSKKFKVLGNTDRHSIKKNLIGALLFDSGETAEATRLKRTARRRYTRRKNRICYLQEIFSNEMAKVDDSFFHRLEESFLVEEDKKHERHPIFGNIVDEVAYHEKYPTIYHLRKKLVDSTDKADLRLIYLALAHMIKFRGHFLIEGDLNPDNSDVDKLFIQLVQTYNQLFEENPINASGVDAKAILSARLSKSRRLENLIAQLPGEKKNGLFGNLIALSLGLTPNFKSNFDLAEDAKLQLSKDTYDDDLDNLLAQIGDQYADLFLAAKNLSDAILLSDILRVNTEITKAPLSASMIKRYDEHHQDLTLLKALVRQQLPEKYKEIFFDQSKNGYAGYIDGGASQEEFYKFIKPILEKMDGTEELLVKLNREDLLRKQRTFDNGSIPHQIHLGELHAILRRQEDFYPFLKDNREKIEKILTFRIPYYVGPLARGNSRFAWMTRKSEETITPWNFEEVVDKGASAQSFIERMTNFDKNLPNEKVLPKHSLLYEYFTVYNELTKVKYVTEGMRKPAFLSGEQKKAIVDLLFKTNRKVTVKQLKEDYFKKIECFDSVEISGVEDRFNASLGTYHDLLKIIKDKDFLDNEENEDILEDIVLTLTLFEDREMIEERLKTYAHLFDDKVMKQLKRRRYTGWGRLSRKLINGIRDKQSGKTILDFLKSDGFANRNFMQLIHDDSLTFKEDIQKAQVSGQGDSLHEHIANLAGSPAIKKGILQTVKVVDELVKVMGRHKPENIVIEMARENQTTQKGQKNSRERMKRIEEGIKELGSQILKEHPVENTQLQNEKLYLYYLQNGRDMYVDQELDINRLSDYDVDHIVPQSFLKDDSIDNKVLTRSDKNRGKSDNVPSEEVVKKMKNYWRQLLNAKLITQRKFDNLTKAERGGLSELDKAGFIKRQLVETRQITKHVAQILDSRMNTKYDENDKLIREVKVITLKSKLVSDFRKDFQFYKVREINNYHHAHDAYLNAVVGTALIKKYPKLESEFVYGDYKVYDVRKMIAKSEQEIGKATAKYFFYSNIMNFFKTEITLANGEIRKRPLIETNGETGEIVWDKGRDFATVRKVLSMPQVNIVKKTEVQTGGFSKESILPKRNSDKLIARKKDWDPKKYGGFVSPTVAYSVLVVAKVEKGKSKKLKSVKELLGITIMERSSFEKNPIDFLEAKGYKEVKKDLIIKLPKYSLFELENGRKRMLASARELQKGNELALPSKYVNFLYLASHYEKLKGSPEDNEQKQLFVEQHKHYLDEIIEQISEFSKRVILADANLDKVLSAYNKHRDKPIREQAENIIHLFTLTNLGAPAAFKYFDTTIDRKQYRSTKEVLDATLIHQSITGLYETRIDLSQLGGDEGADKRTADGSEFESPKKKRKV

SEQ ID NO: 248 - protein, 1588 aa, Artificial Sequence
  Description of Artificial Sequence: Synthetic polypeptide
MSEVEFSHEYWMRHALTLAKRARDEREVPVGAVLVLNNRVIGEGWNRAIGLHDPTAHAEIMALRQGGLVMQNYRLIDATLYVTFEPCVMCAGAMIHSRIGRVVFGVRNAKTGAAGSLMDVLHYPGMNHRVEITEGILADECAALLCTFFRMPRSVFNAQKKAQSSTDSGGSSGGSSGSETPGTSESATPESSGGSSGGSDKKYSIGLAIGTNSVGWAVITDEYKVPSKKFKVLGNTDRHSIKKNLIGALLFDSGETAEATRLKRTARRRYTRRKNRICYLQEIFSNEMAKVDDSFFHRLEESFLVEEDKKHERHPIFGNIVDEVAYHEKYPTIYHLRKKLVDSTDKADLRLIYLALAHMIKFRGHFLIEGDLNPDNSDVDKLFIQLVQTYNQLFEENPINASGVDAKAILSARLSKSRRLENLIAQLPGEKKNGLFGNLIALSLGLTPNFKSNFDLAEDAKLQLSKDTYDDDLDNLLAQIGDQYADLFLAAKNLSDAILLSDILRVNTEITKAPLSASMIKRYDEHHQDLTLLKALVRQQLPEKYKEIFFDQSKNGYAGYIDGGASQEEFYKFIKPILEKMDGTEELLVKLNREDLLRKQRTFDNGSIPHQIHLGELHAILRRQEDFYPFLKDNREKIEKILTFRIPYYVGPLARGNSRFAWMTRKSEETITPWNFEEVVDKGASAQSFIERMTNFDKNLPNEKVLPKHSLLYEYFTVYNELTKVKYVTEGMRKPAFLSGEQKKAIVDLLFKTNRKVTVKQLKEDYFKKIECFDSVEISGVEDRFNASLGTYHDLLKIIKDKDFLDNEENEDILEDIVLTLTLFEDREMIEERLKTYAHLFDDKVMKQLKRRRYTGWGRLSRKLINGIRDKQSGKTILDFLKSDGFANRNFMQLIHDDSLTFKEDIQKAQVSGQGDSLHEHIANLAGSPAIKKGILQTVKVVDELVKVMGRHKPENIVIEMARENQTTQKGQKNSRERMKRIEEGIKELGSQILKEHPVENTQLQNEKLYLYYLQNGRDMYVDQELDINRLSDYDVDHIVPQSFLKDDSIDNKVLTRSDKNRGKSDNVPSEEVVKKMKNYWRQLLNAKLITQRKFDNLTKAERGGLSELDKAGFIKRQLVETRQITKHVAQILDSRMNTKYDENDKLIREVKVITLKSKLVSDFRKDFQFYKVREINNYHHAHDAYLNAVVGTALIKKYPKLESEFVYGDYKVYDVRKMIAKSEQEIGKATAKYFFYSNIMNFFKTEITLANGEIRKRPLIETNGETGEIVWDKGRDFATVRKVLSMPQVNIVKKTEVQTGGFSKESILPKRNSDKLIARKKDWDPKKYGGFVSPTVAYSVLVVAKVEKGKSKKLKSVKELLGITIMERSSFEKNPIDFLEAKGYKEVKKDLIIKLPKYSLFELENGRKRMLASARELQKGNELALPSKYVNFLYLASHYEKLKGSPEDNEQKQLFVEQHKHYLDEIIEQISEFSKRVILADANLDKVLSAYNKHRDKPIREQAENIIHLFTLTNLGAPAAFKYFDTTIDRKQYRSTKEVLDATLIHQSITGLYETRIDLSQLGGDEGADKRTADGSEFESPKKKRKV

SEQ ID NO: 249 - protein, 1588 aa, Artificial Sequence
  Description of Artificial Sequence: Synthetic polypeptide
MSEVEFSHEYWMRHALTLAKRARDEREVPVGAVLVLNNRVIGEGWNRAIGLHDPTAHAEIMALRQGGLVMQNYRLYDATLYVTFEPCVMCAGAMIHSRIGRVVFGVRNAKTGAAGSLMDVLHHPGMNHRVEITEGILADECAALLCRFFRMPRRVFNAQKKAQSSTDSGGSSGGSSGSETPGTSESATPESSGGSSGGSDKKYSIGLAIGTNSVGWAVITDEYKVPSKKFKVLGNTDRHSIKKNLIGALLFDSGETAEATRLKRTARRRYTRRKNRICYLQEIFSNEMAKVDDSFFHRLEESFLVEEDKKHERHPIFGNIVDEVAYHEKYPTIYHLRKKLVDSTDKADLRLIYLALAHMIKFRGHFLIEGDLNPDNSDVDKLFIQLVQTYNQLFEENPINASGVDAKAILSARLSKSRRLENLIAQLPGEKKNGLFGNLIALSLGLTPNFKSNFDLAEDAKLQLSKDTYDDDLDNLLAQIGDQYADLFLAAKNLSDAILLSDILRVNTEITKAPLSASMIKRYDEHHQDLTLLKALVRQQLPEKYKEIFFDQSKNGYAGYIDGGASQEEFYKFIKPILEKMDGTEELLVKLNREDLLRKQRTFDNGSIPHQIHLGELHAILRRQEDFYPFLKDNREKIEKILTFRIPYYVGPLARGNSRFAWMTRKSEETITPWNFEEVVDKGASAQSFIERMTNFDKNLPNEKVLPKHSLLYEYFTVYNELTKVKYVTEGMRKPAFLSGEQKKAIVDLLFKTNRKVTVKQLKEDYFKKIECFDSVEISGVEDRFNASLGTYHDLLKIIKDKDFLDNEENEDILEDIVLTLTLFEDREMIEERLKTYAHLFDDKVMKQLKRRRYTGWGRLSRKLINGIRDKQSGKTILDFLKSDGFANRNFMQLIHDDSLTFKEDIQKAQVSGQGDSLHEHIANLAGSPAIKKGILQTVKVVDELVKVMGRHKPENIVIEMARENQTTQKGQKNSRERMKRIEEGIKELGSQILKEHPVENTQLQNEKLYLYYLQNGRDMYVDQELDINRLSDYDVDHIVPQSFLKDDSIDNKVLTRSDKNRGKSDNVPSEEVVKKMKNYWRQLLNAKLITQRKFDNLTKAERGGLSELDKAGFIKRQLVETRQITKHVAQILDSRMNTKYDENDKLIREVKVITLKSKLVSDFRKDFQFYKVREINNYHHAHDAYLNAVVGTALIKKYPKLESEFVYGDYKVYDVRKMIAKSEQEIGKATAKYFFYSNIMNFFKTEITLANGEIRKRPLIETNGETGEIVWDKGRDFATVRKVLSMPQVNIVKKTEVQTGGFSKESILPKRNSDKLIARKKDWDPKKYGGFVSPTVAYSVLVVAKVEKGKSKKLKSVKELLGITIMERSSFEKNPIDFLEAKGYKEVKKDLIIKLPKYSLFELENGRKRMLASARELQKGNELALPSKYVNFLYLASHYEKLKGSPEDNEQKQLFVEQHKHYLDEIIEQISEFSKRVILADANLDKVLSAYNKHRDKPIREQAENIIHLFTLTNLGAPAAFKYFDTTIDRKQYRSTKEVLDATLIHQSITGLYETRIDLSQLGGDEGADKRTADGSEFESPKKKRKV

SEQ ID NO: 250 - protein, 1588 aa, Artificial Sequence
  Description of Artificial Sequence: Synthetic polypeptide
MSEVEFSHEYWMRHALTLAKRARDEREVPVGAVLVLNNRVIGEGWNRAIGLHDPTAHAEIMALRQGGLVMQNYRLIDATLYSTFEPCVMCAGAMIHSRIGRVVFGVRNAKTGAAGSLMDVLHYPGMNHRVEITEGILADECAALLCYFFRMPRRVFNAQKKAQSSTDSGGSSGGSSGSETPGTSESATPESSGGSSGGSDKKYSIGLAIGTNSVGWAVITDEYKVPSKKFKVLGNTDRHSIKKNLIGALLFDSGETAEATRLKRTARRRYTRRKNRICYLQEIFSNEMAKVDDSFFHRLEESFLVEEDKKHERHPIFGNIVDEVAYHEKYPTIYHLRKKLVDSTDKADLRLIYLALAHMIKFRGHFLIEGDLNPDNSDVDKLFIQLVQTYNQLFEENPINASGVDAKAILSARLSKSRRLENLIAQLPGEKKNGLFGNLIALSLGLTPNFKSNFDLAEDAKLQLSKDTYDDDLDNLLAQIGDQYADLFLAAKNLSDAILLSDILRVNTEITKAPLSASMIKRYDEHHQDLTLLKALVRQQLPEKYKEIFFDQSKNGYAGYIDGGASQEEFYKFIKPILEKMDGTEELLVKLNREDLLRKQRTFDNGSIPHQIHLGELHAILRRQEDFYPFLKDNREKIEKILTFRIPYYVGPLARGNSRFAWMTRKSEETITPWNFEEVVDKGASAQSFIERMTNFDKNLPNEKVLPKHSLLYEYFTVYNELTKVKYVTEGMRKPAFLSGEQKKAIVDLLFKTNRKVTVKQLKEDYFKKIECFDSVEISGVEDRFNASLGTYHDLLKIIKDKDFLDNEENEDILEDIVLTLTLFEDREMIEERLKTYAHLFDDKVMKQLKRRRYTGWGRLSRKLINGIRDKQSGKTILDFLKSDGFANRNFMQLIHDDSLTFKEDIQKAQVSGQGDSLHEHIANLAGSPAIKKGILQTVKVVDELVKVMGRHKPENIVIEMARENQTTQKGQKNSRERMKRIEEGIKELGSQILKEHPVENTQLQNEKLYLYYLQNGRDMYVDQELDINRLSDYDVDHIVPQSFLKDDSIDNKVLTRSDKNRGKSDNVPSEEVVKKMKNYWRQLLNAKLITQRKFDNLTKAERGGLSELDKAGFIKRQLVETRQITKHVAQILDSRMNTKYDENDKLIREVKVITLKSKLVSDFRKDFQFYKVREINNYHHAHDAYLNAVVGTALIKKYPKLESEFVYGDYKVYDVRKMIAKSEQEIGKATAKYFFYSNIMNFFKTEITLANGEIRKRPLIETNGETGEIVWDKGRDFATVRKVLSMPQVNIVKKTEVQTGGFSKESILPKRNSDKLIARKKDWDPKKYGGFVSPTVAYSVLVVAKVEKGKSKKLKSVKELLGITIMERSSFEKNPIDFLEAKGYKEVKKDLIIKLPKYSLFELENGRKRMLASARELQKGNELALPSKYVNFLYLASHYEKLKGSPEDNEQKQLFVEQHKHYLDEIIEQISEFSKRVILADANLDKVLSAYNKHRDKPIREQAENIIHLFTLTNLGAPAAFKYFDTTIDRKQYRSTKEVLDATLIHQSITGLYETRIDLSQLGGDEGADKRTADGSEFESPKKKRKV

SEQ ID NO: 251 - protein, 4 aa, Artificial Sequence
  Description of Artificial Sequence: Synthetic peptide
SGGS

SEQ ID NO: 252 - protein, 21 aa, Artificial Sequence
  Description of Artificial Sequence: Synthetic peptide
  MISC_FEATURE (1)..(21): This sequence may encompass 1, 3, or 7 "Gly Gly Ser" repeating units
GGSGGSGGSGGSGGSGGSGGS

SEQ ID NO: 253 - protein, 5 aa, Artificial Sequence
  Description of Artificial Sequence: Synthetic peptide
PAPAP

SEQ ID NO: 254 - protein, 6 aa, Artificial Sequence
  Description of Artificial Sequence: Synthetic peptide
PAPAPA

SEQ ID NO: 255 - protein, 7 aa, Artificial Sequence
  Description of Artificial Sequence: Synthetic peptide
PAPAPAP

SEQ ID NO: 256 - protein, 8 aa, Artificial Sequence
  Description of Artificial Sequence: Synthetic peptide
PAPAPAPA

SEQ ID NO: 257 - protein, 9 aa, Artificial Sequence
  Description of Artificial Sequence: Synthetic peptide
PAPAPAPAP

SEQ ID NO: 258 - protein, 15 aa, Artificial Sequence
  Description of Artificial Sequence: Synthetic peptide
PAPAPAPAPAPAPAP

SEQ ID NO: 259 - protein, 21 aa, Artificial Sequence
  Description of Artificial Sequence: Synthetic peptide
PAPAPAPAPAPAPAPAPAPAP

SEQ ID NO: 260 - DNA, 20 bp, Artificial Sequence
  Description of Artificial Sequence: Synthetic oligonucleotide
aataccgcagagtctagact

SEQ ID NO: 261 - DNA, 20 bp, Artificial Sequence
  Description of Artificial Sequence: Synthetic oligonucleotide
tccaccacgagtctagactc

SEQ ID NO: 262 - DNA, 20 bp, Artificial Sequence
  Description of Artificial Sequence: Synthetic oligonucleotide
cacatccagcgataaccagg

SEQ ID NO: 263 - DNA, 20 bp, Artificial Sequence
  Description of Artificial Sequence: Synthetic oligonucleotide
aaagcccaggatgatgggat

SEQ ID NO: 264 - DNA, 20 bp, Artificial Sequence
  Description of Artificial Sequence: Synthetic oligonucleotide
cgaaccactgaacaaatggc

SEQ ID NO: 265 - DNA, 20 bp, Artificial Sequence
  Description of Artificial Sequence: Synthetic oligonucleotide
atccatataactgaaagcca

SEQ ID NO: 266 - DNA, 20 bp, Artificial Sequence
  Description of Artificial Sequence: Synthetic oligonucleotide
atacccaaagacaaaagaaa

SEQ ID NO: 267 - DNA, 20 bp, Artificial Sequence
  Description of Artificial Sequence: Synthetic oligonucleotide
atgcaactttttcacctctg

SEQ ID NO: 268 - DNA, 20 bp, Artificial Sequence
  Description of Artificial Sequence: Synthetic oligonucleotide
tcaagcctccaagctgtgcc

SEQ ID NO: 269 - DNA, 20 bp, Artificial Sequence
  Description of Artificial Sequence: Synthetic oligonucleotide
cccagcaaagaattgcttgc

SEQ ID NO: 270 - DNA, 20 bp, Artificial Sequence
  Description of Artificial Sequence: Synthetic oligonucleotide
ccacccaggtagctagagtc

SEQ ID NO: 271 - DNA, 20 bp, Artificial Sequence
  Description of Artificial Sequence: Synthetic oligonucleotide
aatccacactccgaaagaca

SEQ ID NO: 272 - DNA, 20 bp, Artificial Sequence
  Description of Artificial Sequence: Synthetic oligonucleotide
gtctcaatcgccgcgtcgca

SEQ ID NO: 273 - DNA, 20 bp, Artificial Sequence
  Description of Artificial Sequence: Synthetic oligonucleotide
aagatctcaatctcgggaac

SEQ ID NO: 274 - DNA, 20 bp, Artificial Sequence
  Description of Artificial Sequence: Synthetic oligonucleotide
ttttccaatgaggattaaag

SEQ ID NO: 275 - DNA, 20 bp, Artificial Sequence
  Description of Artificial Sequence: Synthetic oligonucleotide
tttacaccaagacattatca

SEQ ID NO: 276 - DNA, 20 bp, Artificial Sequence
  Description of Artificial Sequence: Synthetic oligonucleotide
gaacagtttgtaggcccact

SEQ ID NO: 277 - DNA, 20 bp, Artificial Sequence
  Description of Artificial Sequence: Synthetic oligonucleotide
attgcaattgattatgcctg

SEQ ID NO: 278 - DNA, 20 bp, Artificial Sequence
  Description of Artificial Sequence: Synthetic oligonucleotide
cgccttccatagagtgtgta

SEQ ID NO: 279 - DNA, 20 bp, Artificial Sequence
  Description of Artificial Sequence: Synthetic oligonucleotide
cccaagaatatggtgaccca

SEQ ID NO: 280 - DNA, 20 bp, Artificial Sequence
  Description of Artificial Sequence: Synthetic oligonucleotide
acaagatctacagcatgggg

SEQ ID NO: 281 - DNA, 20 bp, Artificial Sequence
  Description of Artificial Sequence: Synthetic oligonucleotide
cagccttcagagcaaacaca

SEQ ID NO: 282 - DNA, 20 bp, Artificial Sequence
  Description of Artificial Sequence: Synthetic oligonucleotide
tcagagcaaacacagcaaat

SEQ ID NO: 283 - DNA, 20 bp, Artificial Sequence
  Description of Artificial Sequence: Synthetic oligonucleotide
ccccaatcctcgagaagatt

SEQ ID NO: 284 - DNA, 20 bp, Artificial Sequence
  Description of Artificial Sequence: Synthetic oligonucleotide
ccaggacaagttggaggaca

SEQ ID NO: 285 - DNA, 20 bp, Artificial Sequence
  Description of Artificial Sequence: Synthetic oligonucleotide
gctgtaccaaaccttcggac

SEQ ID NO: 286 - DNA, 20 bp, Artificial Sequence
  Description of Artificial Sequence: Synthetic oligonucleotide
accccatctctttgttttgt

SEQ ID NO: 287 - DNA, 20 bp, Artificial Sequence
  Description of Artificial Sequence: Synthetic oligonucleotide
ccacaagaacacatcataca

SEQ ID NO: 288 - DNA, 20 bp, Artificial Sequence
  Description of Artificial Sequence: Synthetic oligonucleotide
actttccaatcaataggcct

SEQ ID NO: 289 - DNA, 20 bp, Artificial Sequence
  Description of Artificial Sequence: Synthetic oligonucleotide
gtcaacgaattgtgggtctt

SEQ ID NO: 290 - DNA, 20 bp, Artificial Sequence
  Description of Artificial Sequence: Synthetic oligonucleotide
acacaatgtggttatcctgc

SEQ ID NO: 291 - DNA, 20 bp, Artificial Sequence
  Description of Artificial Sequence: Synthetic oligonucleotide
cggcaacggccaggtctgtg

SEQ ID NO: 292 - DNA, 20 bp, Artificial Sequence
  Description of Artificial Sequence: Synthetic oligonucleotide
gtggtctccatgcgacgtgc

SEQ ID NO: 293 - DNA, 20 bp, Artificial Sequence
  Description of Artificial Sequence: Synthetic oligonucleotide
taccgcagagtctagactcg

SEQ ID NO: 294 - DNA, 20 bp, Artificial Sequence
  Description of Artificial Sequence: Synthetic oligonucleotide
cgcagagtctagactcgtgg

SEQ ID NO: 295 - DNA, 20 bp, Artificial Sequence
  Description of Artificial Sequence: Synthetic oligonucleotide
caccacgagtctagactctg

SEQ ID NO: 296 - DNA, 20 bp, Artificial Sequence
  Description of Artificial Sequence: Synthetic oligonucleotide
gaaagcccaggatgatggga

SEQ ID NO: 297 - DNA, 20 bp, Artificial Sequence
  Description of Artificial Sequence: Synthetic oligonucleotide
ccacccaaggcacagcttgg

SEQ ID NO: 298 - DNA, 20 bp, Artificial Sequence
  Description of Artificial Sequence: Synthetic oligonucleotide
aagccacccaaggcacagct

SEQ ID NO: 299 - DNA, 20 bp, Artificial Sequence
  Description of Artificial Sequence: Synthetic oligonucleotide
ccatgccccaaagccaccca

SEQ ID NO: 300 - DNA, 20 bp, Artificial Sequence
  Description of Artificial Sequence: Synthetic oligonucleotide
tcaggcaagcaattctttgc

SEQ ID NO: 301 - DNA, 20 bp, Artificial Sequence
  Description of Artificial Sequence: Synthetic oligonucleotide
caggcaagcaattctttgct

SEQ ID NO: 302 - DNA, 20 bp, Artificial Sequence
  Description of Artificial Sequence: Synthetic oligonucleotide
aggcaagcaattctttgctg

SEQ ID NO: 303 - DNA, 20 bp, Artificial Sequence
  Description of Artificial Sequence: Synthetic oligonucleotide
ggcaagcaattctttgctgg

SEQ ID NO: 304 - DNA, 20 bp, Artificial Sequence
  Description of Artificial Sequence: Synthetic oligonucleotide
gcaagcaattctttgctggg

SEQ ID NO: 305 - DNA, 20 bp, Artificial Sequence
  Description of Artificial Sequence: Synthetic oligonucleotide
tccaaggaatactaacattg

SEQ ID NO: 306 - DNA, 20 bp, Artificial Sequence
  Description of Artificial Sequence: Synthetic oligonucleotide
ttccaatgaggattaaagac

SEQ ID NO: 307 - DNA, 20 bp, Artificial Sequence
  Description of Artificial Sequence: Synthetic oligonucleotide
tgcaattgattatgcctgct

SEQ ID NO: 308 - DNA, 20 bp, Artificial Sequence
  Description of Artificial Sequence: Synthetic oligonucleotide
tgggaacaagatctacagca

SEQ ID NO: 309 - DNA, 20 bp, Artificial Sequence
  Description of Artificial Sequence: Synthetic oligonucleotide
gggaacaagatctacagcat

SEQ ID NO: 310 - DNA, 20 bp, Artificial Sequence
  Description of Artificial Sequence: Synthetic oligonucleotide
ggaacaagatctacagcatg

SEQ ID NO: 311 - DNA, 20 bp, Artificial Sequence
  Description of Artificial Sequence: Synthetic oligonucleotide
tcaatcccaacaaggacacc

SEQ ID NO: 312 - DNA, 20 bp, Artificial Sequence
  Description of Artificial Sequence: Synthetic oligonucleotide
gacgccaacaaggtaggagc

SEQ ID NO: 313 - DNA, 20 bp, Artificial Sequence
  Description of Artificial Sequence: Synthetic oligonucleotide
tgctccagctcctaccttgt

SEQ ID NO: 314 - DNA, 20 bp, Artificial Sequence
  Description of Artificial Sequence: Synthetic oligonucleotide
ccaccaatcgccagacagga

SEQ ID NO: 315 - DNA, 20 bp, Artificial Sequence
  Description of Artificial Sequence: Synthetic oligonucleotide
agccaccagcagggaaatac

SEQ ID NO: 316 - DNA, 20 bp, Artificial Sequence
  Description of Artificial Sequence: Synthetic oligonucleotide
accaggacaagttggaggac

SEQ ID NO: 317 - DNA, 20 bp, Artificial Sequence
  Description of Artificial Sequence: Synthetic oligonucleotide
cgataaccaggacaagttgg

SEQ ID NO: 318 - DNA, 20 bp, Artificial Sequence
  Description of Artificial Sequence: Synthetic oligonucleotide
cccatctctttgttttgtta

SEQ ID NO: 319 - DNA, 20 bp, Artificial Sequence
  Description of Artificial Sequence: Synthetic oligonucleotide
ccccatctctttgttttgtt

SEQ ID NO: 320 - DNA, 20 bp, Artificial Sequence
  Description of Artificial Sequence: Synthetic oligonucleotide
tcaacgaattgtgggtcttt

SEQ ID NO: 321 - DNA, 20 bp, Artificial Sequence
  Description of Artificial Sequence: Synthetic oligonucleotide
caacgaattgtgggtctttt

SEQ ID NO: 322 - DNA, 20 bp, Artificial Sequence
  Description of Artificial Sequence: Synthetic oligonucleotide
ggtctccatgcgacgtgcag

SEQ ID NO: 323 - DNA, 20 bp, Artificial Sequence
  Description of Artificial Sequence: Synthetic oligonucleotide
acaggcggggtttttcttgt

SEQ ID NO: 324 - DNA, 20 bp, Artificial Sequence
  Description of Artificial Sequence: Synthetic oligonucleotide
gcagagtctagactcgtggt

SEQ ID NO: 325 - DNA, 20 bp, Artificial Sequence
  Description of Artificial Sequence: Synthetic oligonucleotide
gagaagtccaccacgagtct

SEQ ID NO: 326 - DNA, 20 bp, Artificial Sequence
  Description of Artificial Sequence: Synthetic oligonucleotide
gacacatccagcgataacca

SEQ ID NO: 327 - DNA, 20 bp, Artificial Sequence
  Description of Artificial Sequence: Synthetic oligonucleotide
aagcccaggatgatgggatg

SEQ ID NO: 328 - DNA, 20 bp, Artificial Sequence
  Description of Artificial Sequence: Synthetic oligonucleotide
ccactcccataggaattttc

SEQ ID NO: 329 - DNA, 20 bp, Artificial Sequence
  Description of Artificial Sequence: Synthetic oligonucleotide
ctgagccaggagaaacgggc

SEQ ID NO: 330 - DNA, 20 bp, Artificial Sequence
  Description of Artificial Sequence: Synthetic oligonucleotide
taccacatcatccatataac

SEQ ID NO: 331 - DNA, 20 bp, Artificial Sequence
  Description of Artificial Sequence: Synthetic oligonucleotide
agccacccaaggcacagctt

SEQ ID NO: 332 - DNA, 20 bp, Artificial Sequence
  Description of Artificial Sequence: Synthetic oligonucleotide
ccagcaaagaattgcttgcc

SEQ ID NO: 333 - DNA, 20 bp, Artificial Sequence
  Description of Artificial Sequence: Synthetic oligonucleotide
gacgacgaggcaggtcccct

SEQ ID NO: 334 - DNA, 20 bp, Artificial Sequence
  Description of Artificial Sequence: Synthetic oligonucleotide
gacgaggcaggtcccctaga

SEQ ID NO: 335 - DNA, 20 bp, Artificial Sequence
  Description of Artificial Sequence: Synthetic oligonucleotide
ggtctcaatcgccgcgtcgc

SEQ ID NO: 336 - DNA, 20 bp, Artificial Sequence
  Description of Artificial Sequence: Synthetic oligonucleotide
ctcaatcgccgcgtcgcaga

SEQ ID NO: 337 - DNA, 20 bp, Artificial Sequence
  Description of Artificial Sequence: Synthetic oligonucleotide
agtccaaggaatactaacat

SEQ ID NO: 338 - DNA, 20 bp, Artificial Sequence
  Description of Artificial Sequence: Synthetic oligonucleotide
tgttttccaatgaggattaa

SEQ ID NO: 339 - DNA, 20 bp, Artificial Sequence
  Description of Artificial Sequence: Synthetic oligonucleotide
tttccaccagcaatcctctg

SEQ ID NO: 340 - DNA, 20 bp, Artificial Sequence
  Description of Artificial Sequence: Synthetic oligonucleotide
cccaacaaggacacctggcc

SEQ ID NO: 341 - DNA, 20 bp, Artificial Sequence
  Description of Artificial Sequence: Synthetic oligonucleotide
acgccaacaaggtaggagct

SEQ ID NO: 342 - DNA, 20 bp, Artificial Sequence
  Description of Artificial Sequence: Synthetic oligonucleotide
cctccaccaatcgccagaca

SEQ ID NO: 343 - DNA, 20 bp, Artificial Sequence
  Description of Artificial Sequence: Synthetic oligonucleotide
ccaatcctcgagaagattga

SEQ ID NO: 344 - DNA, 20 bp, Artificial Sequence
  Description of Artificial Sequence: Synthetic oligonucleotide
tccccaatcctcgagaagat

SEQ ID NO: 345 - DNA, 20 bp, Artificial Sequence
  Description of Artificial Sequence: Synthetic oligonucleotide
agggtccccaatcctcgaga

SEQ ID NO: 346 - DNA, 20 bp, Artificial Sequence
  Description of Artificial Sequence: Synthetic oligonucleotide
cttctctcaattttctaggg

SEQ ID NO: 347 - DNA, 20 bp, Artificial Sequence
  Description of Artificial Sequence: Synthetic oligonucleotide
gataaccaggacaagttgga

SEQ ID NO: 348 - DNA, 20 bp, Artificial Sequence
  Description of Artificial Sequence: Synthetic oligonucleotide
ccaccagcacgggaccatgc

SEQ ID NO: 349 - DNA, 20 bp, Artificial Sequence
  Description of Artificial Sequence: Synthetic oligonucleotide
ctccatgcgacgtgcagagg

SEQ ID NO: 350 - DNA, 20 bp, Artificial Sequence
  Description of Artificial Sequence: Synthetic oligonucleotide
tatggatgatgtggtattgg

SEQ ID NO: 351 - DNA, 20 bp, Artificial Sequence
  Description of Artificial Sequence: Synthetic oligonucleotide
tgccaactggatcctgcgcg

SEQ ID NO: 352 - DNA, 20 bp, Artificial Sequence
  Description of Artificial Sequence: Synthetic oligonucleotide
gctgccaactggatcctgcg

SEQ ID NO: 353 - DNA, 20 bp, Artificial Sequence
  Description of Artificial Sequence: Synthetic oligonucleotide
ctgccaactggatcctgcgc

SEQ ID NO: 354 - DNA, 20 bp, Artificial Sequence
  Description of Artificial Sequence: Synthetic oligonucleotide
cgcccaccgaatgttgccca

SEQ ID NO: 355 - DNA, 20 bp, Artificial Sequence
  Description of Artificial Sequence: Synthetic oligonucleotide
ctcctcccagtctttaaaca

SEQ ID NO: 356 - DNA, 20 bp, Artificial Sequence
  Description of Artificial Sequence: Synthetic oligonucleotide
aaaaaccccgcctgtaacac

SEQ ID NO: 357 - DNA, 20 bp, Artificial Sequence
  Description of Artificial Sequence: Synthetic oligonucleotide
aaaacgccgcagacacatcc

SEQ ID NO: 358 - DNA, 20 bp, Artificial Sequence
  Description of Artificial Sequence: Synthetic oligonucleotide
aaaggccttgtaagttggcg

SEQ ID NO: 359 - DNA, 21 bp, Artificial Sequence
  Description of Artificial Sequence: Synthetic oligonucleotide
aaaggccttgtaagttggcga

SEQ ID NO: 360 - DNA, 20 bp, Artificial Sequence
  Description of Artificial Sequence: Synthetic oligonucleotide
aaccactgaacaaatggcac

SEQ ID NO: 361 - DNA, 20 bp, Artificial Sequence
  Description of Artificial Sequence: Synthetic oligonucleotide
aaccccgcctgtaacacgag

SEQ ID NO: 362 - DNA, 20 bp, Artificial Sequence
  Description of Artificial Sequence: Synthetic oligonucleotide
aacgccgcagacacatccag

SEQ ID NO: 363 - DNA, 20 bp, Artificial Sequence
  Description of Artificial Sequence: Synthetic oligonucleotide
aagaagtcagaaggcaaaaa

SEQ ID NO: 364 - DNA, 20 bp, Artificial Sequence
  Description of Artificial Sequence: Synthetic oligonucleotide
aagccctacgaaccactgaa

SEQ ID NO: 365 - DNA, 20 bp, Artificial Sequence
  Description of Artificial Sequence: Synthetic oligonucleotide
aagcctccaagctgtgcctt

SEQ ID NO: 366 - DNA, 20 bp, Artificial Sequence
  Description of Artificial Sequence: Synthetic oligonucleotide
aaggcacagcttggaggctt

SEQ ID NO: 367 - DNA, 21 bp, Artificial Sequence
  Description of Artificial Sequence: Synthetic oligonucleotide
aaggcacagcttggaggcttg

SEQ ID NO: 368 - DNA, 20 bp, Artificial Sequence
  Description of Artificial Sequence: Synthetic oligonucleotide
aaggccttgtaagttggcga

SEQ ID NO: 369 - DNA, 21 bp, Artificial Sequence
  Description of Artificial Sequence: Synthetic oligonucleotide
aatcgccgcgtcgcagaagat

SEQ ID NO: 370 - DNA, 20 bp, Artificial Sequence
  Description of Artificial Sequence: Synthetic oligonucleotide
aatgtcaacgaccgaccttg

SEQ ID NO: 371 - DNA, 21 bp, Artificial Sequence
  Description of Artificial Sequence: Synthetic oligonucleotide
accaatttatgcctacagcct

SEQ ID NO: 372 - DNA, 21 bp, Artificial Sequence
  Description of Artificial Sequence: Synthetic oligonucleotide
acgaaccactgaacaaatggc

SEQ ID NO: 373 - DNA, 20 bp, Artificial Sequence
  Description of Artificial Sequence: Synthetic oligonucleotide
acggggcgcacctctcttta

SEQ ID NO: 374 - DNA, 20 bp, Artificial Sequence
  Description of Artificial Sequence: Synthetic oligonucleotide
actccctcgcctcgcagacg

SEQ ID NO: 375 - DNA, 20 bp, Artificial Sequence
  Description of Artificial Sequence: Synthetic oligonucleotide
actgaacaaatggcactagt

SEQ ID NO: 376 - DNA, 20 bp, Artificial Sequence
  Description of Artificial Sequence: Synthetic oligonucleotide
acttctctcaattttctagg

SEQ ID NO: 377 - DNA, 20 bp, Artificial Sequence
  Description of Artificial Sequence: Synthetic oligonucleotide
actttctcgccaacttacaa

SEQ ID NO: 378 - DNA, 20 bp, Artificial Sequence
  Description of Artificial Sequence: Synthetic oligonucleotide
agaaaggccttgtaagttgg

SEQ ID NO: 379 - DNA, 20 bp, Artificial Sequence
  Description of Artificial Sequence: Synthetic oligonucleotide
agaagaactccctcgcctcg

SEQ ID NO: 380 - DNA, 20 bp, Artificial Sequence
  Description of Artificial Sequence: Synthetic oligonucleotide
agacaaaagaaaattggtaa

SEQ ID NO: 381 - DNA, 20 bp, Artificial Sequence
  Description of Artificial Sequence: Synthetic oligonucleotide
agccctacgaaccactgaac

SEQ ID NO: 382 - DNA, 20 bp, Artificial Sequence
  Description of Artificial Sequence: Synthetic oligonucleotide
agctgtgccttgggtggctt

SEQ ID NO: 383 - DNA, 20 bp, Artificial Sequence
  Description of Artificial Sequence: Synthetic oligonucleotide
aggaggctgtaggcataaat

SEQ ID NO: 384 - DNA, 20 bp, Artificial Sequence
  Description of Artificial Sequence: Synthetic oligonucleotide
aggagttccgcagtatggat

SEQ ID NO: 385 - DNA, 20 bp, Artificial Sequence
  Description of Artificial Sequence: Synthetic oligonucleotide
aggcaggtcccctagaagaa

SEQ ID NO: 386 - DNA, 20 bp, Artificial Sequence
  Description of Artificial Sequence: Synthetic oligonucleotide
aggccttgtaagttggcgag

SEQ ID NO: 387 - DNA, 20 bp, Artificial Sequence
  Description of Artificial Sequence: Synthetic oligonucleotide
aggcgagggagttcttcttc

SEQ ID NO: 388 - DNA, 20 bp, Artificial Sequence
  Description of Artificial Sequence: Synthetic oligonucleotide
agtccaagagtcctcttatg

SEQ ID NO: 389 - DNA, 20 bp, Artificial Sequence
  Description of Artificial Sequence: Synthetic oligonucleotide
agttccgcagtatggatcgg

SEQ ID NO: 390 - DNA, 20 bp, Artificial Sequence
  Description of Artificial Sequence: Synthetic oligonucleotide
agttcttcttctaggggacc

SEQ ID NO: 391 - DNA, 20 bp, Artificial Sequence
  Description of Artificial Sequence: Synthetic oligonucleotide
atccatactgcggaactcct

SEQ ID NO: 392 - DNA, 20 bp, Artificial Sequence
  Description of Artificial Sequence: Synthetic oligonucleotide
atcttctgcgacgcggcgat

SEQ ID NO: 393 - DNA, 20 bp, Artificial Sequence
  Description of Artificial Sequence: Synthetic oligonucleotide
atgtcaacgaccgaccttga

SEQ ID NO: 394 - DNA, 20 bp, Artificial Sequence
  Description of Artificial Sequence: Synthetic oligonucleotide
atttgttcagtggttcgtag

SEQ ID NO: 395 - DNA, 20 bp, Artificial Sequence
  Description of Artificial Sequence: Synthetic oligonucleotide
caaatggcactagtaaactg

SEQ ID NO: 396 - DNA, 20 bp, Artificial Sequence
  Description of Artificial Sequence: Synthetic oligonucleotide
caagcctccaagctgtgcct

SEQ ID NO: 397 - DNA, 20 bp, Artificial Sequence
  Description of Artificial Sequence: Synthetic oligonucleotide
caaggcacagcttggaggct

SEQ ID NO: 398 - DNA, 20 bp, Artificial Sequence
  Description of Artificial Sequence: Synthetic oligonucleotide
cacccaaggcacagcttgga

SEQ ID NO: 399 - DNA, 20 bp, Artificial Sequence
  Description of Artificial Sequence: Synthetic oligonucleotide
cactgaacaaatggcactag

SEQ ID NO: 400 - DNA, 20 bp, Artificial Sequence
  Description of Artificial Sequence: Synthetic oligonucleotide
catactgcggaactcctagc

SEQ ID NO: 401 - DNA, 21 bp, Artificial Sequence
  Description of Artificial Sequence: Synthetic oligonucleotide
catgcaactttttcacctctg

SEQ ID NO: 402 - DNA, 20 bp, Artificial Sequence
  Description of Artificial Sequence: Synthetic oligonucleotide
catgccccaaagccacccaa

SEQ ID NO: 403 - DNA, 20 bp, Artificial Sequence
  Description of Artificial Sequence: Synthetic oligonucleotide
ccatgcaactttttcacctc

SEQ ID NO: 404 - DNA, 20 bp, Artificial Sequence
  Description of Artificial Sequence: Synthetic oligonucleotide
cccaaagccacccaaggcac

SEQ ID NO: 405 - DNA, 20 bp, Artificial Sequence
  Description of Artificial Sequence: Synthetic oligonucleotide
ccccaaagccacccaaggca

SEQ ID NO: 406 - DNA, 20 bp, Artificial Sequence
  Description of Artificial Sequence: Synthetic oligonucleotide
cccgtctgtgccttctcatc

SEQ ID NO: 407 - DNA, 20 bp, Artificial Sequence
  Description of Artificial Sequence: Synthetic oligonucleotide
ccgcagtatggatcggcaga

SEQ ID NO: 408 - DNA, 20 bp, Artificial Sequence
  Description of Artificial Sequence: Synthetic oligonucleotide
cctacgaaccactgaacaaa

SEQ ID NO: 409 - DNA, 20 bp, Artificial Sequence
  Description of Artificial Sequence: Synthetic oligonucleotide
cctccaagctgtgccttggg

SEQ ID NO: 410 - DNA, 20 bp, Artificial Sequence
  Description of Artificial Sequence: Synthetic oligonucleotide
cctctgccgatccatactgc

SEQ ID NO: 411 - DNA, 20 bp, Artificial Sequence
  Description of Artificial Sequence: Synthetic oligonucleotide
cctgctggtggctccagttc

SEQ ID NO: 412 - DNA, 20 bp, Artificial Sequence
  Description of Artificial Sequence: Synthetic oligonucleotide
cgccgcgtcgcagaagatct

SEQ ID NO: 413 - DNA, 21 bp, Artificial Sequence
  Description of Artificial Sequence: Synthetic oligonucleotide
cgcgtaaagagaggtgcgccc

SEQ ID NO: 414 - DNA, 20 bp, Artificial Sequence
  Description of Artificial Sequence: Synthetic oligonucleotide
cgtgcagaggtgaagcgaag

SEQ ID NO: 415 - DNA, 20 bp, Artificial Sequence
  Description of Artificial Sequence: Synthetic oligonucleotide
ctacgaaccactgaacaaat

SEQ ID NO: 416 - DNA, 21 bp, Artificial Sequence
  Description of Artificial Sequence: Synthetic oligonucleotide
ctagactcgtggtggacttct

SEQ ID NO: 417 - DNA, 20 bp, Artificial Sequence
  Description of Artificial Sequence: Synthetic oligonucleotide
ctccaagctgtgccttgggt

SEQ ID NO: 418 - DNA, 20 bp, Artificial Sequence
  Description of Artificial Sequence: Synthetic oligonucleotide
ctctgccgatccatactgcg

SEQ ID NO: 419 - DNA, 20 bp, Artificial Sequence
  Description of Artificial Sequence: Synthetic oligonucleotide
ctgtgccttgggtggctttg

SEQ ID NO: 420 - DNA, 20 bp, Artificial Sequence
  Description of Artificial Sequence: Synthetic oligonucleotide
ctgttcaagcctccaagctg

SEQ ID NO: 421 - DNA, 20 bp, Artificial Sequence
  Description of Artificial Sequence: Synthetic oligonucleotide
cttctgcgacgcggcgattg

SEQ ID NO: 422 - DNA, 20 bp, Artificial Sequence
  Description of Artificial Sequence: Synthetic oligonucleotide
gaaaaaccccgcctgtaaca

SEQ ID NO: 423 - DNA, 21 bp, Artificial Sequence
  Description of Artificial Sequence: Synthetic oligonucleotide
gaaagccctacgaaccactga

SEQ ID NO: 424 - DNA, 21 bp, Artificial Sequence
  Description of Artificial Sequence: Synthetic oligonucleotide
gaactccctcgcctcgcagac

SEQ ID NO: 425 - DNA, 20 bp, Artificial Sequence
  Description of Artificial Sequence: Synthetic oligonucleotide
gaactggagccaccagcagg

SEQ ID NO: 426 - DNA, 20 bp, Artificial Sequence
  Description of Artificial Sequence: Synthetic oligonucleotide
gaagaactccctcgcctcgc

SEQ ID NO: 427 - DNA, 21 bp, Artificial Sequence
  Description of Artificial Sequence: Synthetic oligonucleotide
gacaaacgggcaacatacctt

SEQ ID NO: 428 - DNA, 20 bp, Artificial Sequence
  Description of Artificial Sequence: Synthetic oligonucleotide
gactcgtggtggacttctct

SEQ ID NO: 429 - DNA, 20 bp, Artificial Sequence
  Description of Artificial Sequence: Synthetic oligonucleotide
gacttctctcaattttctag

SEQ ID NO: 430 - DNA, 21 bp, Artificial Sequence
  Description of Artificial Sequence: Synthetic oligonucleotide
gaggacaaacgggcaacatac

SEQ ID NO: 431 - DNA, 20 bp, Artificial Sequence
  Description of Artificial Sequence: Synthetic oligonucleotide
gaggcaggtcccctagaaga

SEQ ID NO: 432 - DNA, 20 bp, Artificial Sequence
  Description of Artificial Sequence: Synthetic oligonucleotide
gatccatactgcggaactcc

SEQ ID NO: 433 - DNA, 21 bp, Artificial Sequence
  Description of Artificial Sequence: Synthetic oligonucleotide
gattgagatcttctgcgacgc

SEQ ID NO: 434 - DNA, 20 bp, Artificial Sequence
  Description of Artificial Sequence: Synthetic oligonucleotide
gcaactttttcacctctgcc

SEQ ID NO: 435 - DNA, 20 bp, Artificial Sequence
  Description of Artificial Sequence: Synthetic oligonucleotide
gcacagcttggaggcttgaa

SEQ ID NO: 436 - DNA, 20 bp, Artificial Sequence
  Description of Artificial Sequence: Synthetic oligonucleotide
gccacccaaggcacagcttg

SEQ ID NO: 437 - DNA, 20 bp, Artificial Sequence
  Description of Artificial Sequence: Synthetic oligonucleotide
gcgtcagcaaacacttggca

SEQ ID NO: 438 - DNA, 21 bp, Artificial Sequence
  Description of Artificial Sequence: Synthetic oligonucleotide
gctgctatgcctcatcttctt

SEQ ID NO: 439 - DNA, 20 bp, Artificial Sequence
  Description of Artificial Sequence: Synthetic oligonucleotide
gctgtgccttgggtggcttt

SEQ ID NO: 440 - DNA, 20 bp, Artificial Sequence
  Description of Artificial Sequence: Synthetic oligonucleotide
ggaaagccctacgaaccact

SEQ ID NO: 441 - DNA, 20 bp, Artificial Sequence
  Description of Artificial Sequence: Synthetic oligonucleotide
ggacttctctcaattttcta

SEQ ID NO: 442 - DNA, 20 bp, Artificial Sequence
  Description of Artificial Sequence: Synthetic oligonucleotide
ggagtgcgaatccacactcc

SEQ ID NO: 443 - DNA, 20 bp, Artificial Sequence
  Description of Artificial Sequence: Synthetic oligonucleotide
ggagttccgcagtatggatc

SEQ ID NO: 444 - DNA, 20 bp, Artificial Sequence
  Description of Artificial Sequence: Synthetic oligonucleotide
ggcactagtaaactgagcca

SEQ ID NO: 445 - DNA, 20 bp, Artificial Sequence
  Description of Artificial Sequence: Synthetic oligonucleotide
ggccttgtaagttggcgaga

SEQ ID NO: 446 - DNA, 21 bp, Artificial Sequence
  Description of Artificial Sequence: Synthetic oligonucleotide
ggcggggtttttcttgttgac

SEQ ID NO: 447 - DNA, 20 bp, Artificial Sequence
  Description of Artificial Sequence: Synthetic oligonucleotide
ggcgttcacggtggtctcca

SEQ ID NO: 448 - DNA, 20 bp, Artificial Sequence
  Description of Artificial Sequence: Synthetic oligonucleotide
gggaaagccctacgaaccac

SEQ ID NO: 449 - DNA, 20 bp, Artificial Sequence
  Description of Artificial Sequence: Synthetic oligonucleotide
gggactgcgaattttggcca

SEQ ID NO: 450 - DNA, 20 bp, Artificial Sequence
  Description of Artificial Sequence: Synthetic oligonucleotide
ggggcgcacctctctttacg

SEQ ID NO: 451 - DNA, 20 bp, Artificial Sequence
  Description of Artificial Sequence: Synthetic oligonucleotide
gggttgcgtcagcaaacact

SEQ ID NO: 452 - DNA, 20 bp, Artificial Sequence
  Description of Artificial Sequence: Synthetic oligonucleotide
ggtcaccatattcttgggaa

SEQ ID NO: 453 - DNA, 20 bp, Artificial Sequence
  Description of Artificial Sequence: Synthetic oligonucleotide
ggtggagccctcaggctcag

SEQ ID NO: 454 - DNA, 20 bp, Artificial Sequence
  Description of Artificial Sequence: Synthetic oligonucleotide
ggttgcgtcagcaaacactt

SEQ ID NO: 455 - DNA, 20 bp, Artificial Sequence
  Description of Artificial Sequence: Synthetic oligonucleotide
gtcaccatattcttgggaac

SEQ ID NO: 456 - DNA, 21 bp, Artificial Sequence
  Description of Artificial Sequence: Synthetic oligonucleotide
gtccaccacgagtctagactc

SEQ ID NO: 457 - DNA, 20 bp, Artificial Sequence
  Description of Artificial Sequence: Synthetic oligonucleotide
gtccatgccccaaagccacc

SEQ ID NO: 458 - DNA, 20 bp, Artificial Sequence
  Description of Artificial Sequence: Synthetic oligonucleotide
gtcccgtcggcgctgaatcc

SEQ ID NO: 459 - DNA, 20 bp, Artificial Sequence
  Description of Artificial Sequence: Synthetic oligonucleotide
gtcgcagaagatctcaatct

SEQ ID NO: 460 - DNA, 20 bp, Artificial Sequence
  Description of Artificial Sequence: Synthetic oligonucleotide
gtctgtgccttctcatctgc

SEQ ID NO: 461 - DNA, 20 bp, Artificial Sequence
  Description of Artificial Sequence: Synthetic oligonucleotide
gtggacttctctcaattttc

SEQ ID NO: 462 - DNA, 20 bp, Artificial Sequence
  Description of Artificial Sequence: Synthetic oligonucleotide
gttccgcagtatggatcggc

SEQ ID NO: 463 - DNA, 20 bp, Artificial Sequence
  Description of Artificial Sequence: Synthetic oligonucleotide
gtttactagtgccatttgtt

SEQ ID NO: 464 - DNA, 21 bp, Artificial Sequence
  Description of Artificial Sequence: Synthetic oligonucleotide
gtttactagtgccatttgttc

SEQ ID NO: 465 - DNA, 20 bp, Artificial Sequence
  Description of Artificial Sequence: Synthetic oligonucleotide
taaaacgccgcagacacatc

SEQ ID NO: 466 - DNA, 21 bp, Artificial Sequence
  Description of Artificial Sequence: Synthetic oligonucleotide
taaaacgccgcagacacatcc

SEQ ID NO: 467 - DNA, 21 bp, Artificial Sequence
  Description of Artificial Sequence: Synthetic oligonucleotide
taggcagaggtgaaaaagttg

SEQ ID NO: 468 - DNA, 20 bp, Artificial Sequence
  Description of Artificial Sequence: Synthetic oligonucleotide
tcaccatattcttgggaaca

SEQ ID NO: 469 - DNA, 21 bp, Artificial Sequence
  Description of Artificial Sequence: Synthetic oligonucleotide
tcagtttactagtgccatttg

SEQ ID NO: 470 - DNA, 20 bp, Artificial Sequence
  Description of Artificial Sequence: Synthetic oligonucleotide
tccatgccccaaagccaccc

SEQ ID NO: 471 - DNA, 20 bp, Artificial Sequence
  Description of Artificial Sequence: Synthetic oligonucleotide
tccccctagaaaattgagag

SEQ ID NO: 472 - DNA, 20 bp, Artificial Sequence
  Description of Artificial Sequence: Synthetic oligonucleotide
tccgcagtatggatcggcag

SEQ ID NO: 473 - DNA, 20 bp, Artificial Sequence
  Description of Artificial Sequence: Synthetic oligonucleotide
tcctctgccgatccatactg

SEQ ID NO: 474 - DNA, 20 bp, Artificial Sequence
  Description of Artificial Sequence: Synthetic oligonucleotide
tcgcagaagatctcaatctc

SEQ ID NO: 475 - DNA, 20 bp, Artificial Sequence
  Description of Artificial Sequence: Synthetic oligonucleotide
tctcaatcgccgcgtcgcag

SEQ ID NO: 476 - DNA, 20 bp, Artificial Sequence
  Description of Artificial Sequence: Synthetic oligonucleotide
tcttctgcgacgcggcgatt

SEQ ID NO: 477 - DNA, 20 bp, Artificial Sequence
  Description of Artificial Sequence: Synthetic oligonucleotide
tcttgttcccaagaatatgg

SEQ ID NO: 478 - DNA, 20 bp, Artificial Sequence
  Description of Artificial Sequence: Synthetic oligonucleotide
tgagatcttctgcgacgcgg

SEQ ID NO: 479 - DNA, 20 bp, Artificial Sequence
  Description of Artificial Sequence: Synthetic oligonucleotide
tgagcctgagggctccaccc

SEQ ID NO: 480 - DNA, 20 bp, Artificial Sequence
  Description of Artificial Sequence: Synthetic oligonucleotide
tgaggcatagcagcaggatg

SEQ ID NO: 481 - DNA, 20 bp, Artificial Sequence
  Description of Artificial Sequence: Synthetic oligonucleotide
tggacttctctcaattttct

SEQ ID NO: 482 - DNA, 20 bp, Artificial Sequence
  Description of Artificial Sequence: Synthetic oligonucleotide
tggccaaaattcgcagtccc

SEQ ID NO: 483 - DNA, 20 bp, Artificial Sequence
  Description of Artificial Sequence: Synthetic oligonucleotide
tggctttggggcatggacat

SEQ ID NO: 484 - DNA, 20 bp, Artificial Sequence
  Description of Artificial Sequence: Synthetic oligonucleotide
tgtgcacttcgcttcacctc

SEQ ID NO: 485 - DNA, 20 bp, Artificial Sequence
  Description of Artificial Sequence: Synthetic oligonucleotide
tgtgccttgggtggctttgg

SEQ ID NO: 486 - DNA, 20 bp, Artificial Sequence
  Description of Artificial Sequence: Synthetic oligonucleotide
ttaggcagaggtgaaaaagt

SEQ ID NO: 487 - DNA, 21 bp, Artificial Sequence
  Description of Artificial Sequence: Synthetic oligonucleotide
ttcaagcctccaagctgtgcc

SEQ ID NO: 488 - DNA, 20 bp, Artificial Sequence
  Description of Artificial Sequence: Synthetic oligonucleotide
ttcccgagattgagatcttc

SEQ ID NO: 489 - DNA, 20 bp, Artificial Sequence
  Description of Artificial Sequence: Synthetic oligonucleotide
ttccgcagtatggatcggca

SEQ ID NO: 490 - DNA, 20 bp, Artificial Sequence
  Description of Artificial Sequence: Synthetic oligonucleotide
ttcgcttcacctctgcacgt

SEQ ID NO: 491 - DNA, 20 bp, Artificial Sequence
  Description of Artificial Sequence: Synthetic oligonucleotide
tttgctgacgcaacccccac

SEQ ID NO: 492 - DNA, 20 bp, Artificial Sequence
  Description of Artificial Sequence: Synthetic oligonucleotide
tactaacattgaggttcccg

SEQ ID NO: 493 - DNA, 21 bp, Artificial Sequence
  Description of Artificial Sequence: Synthetic oligonucleotide
actcctcccagtctttaaaca

SEQ ID NO: 494 - DNA, 20 bp, Artificial Sequence
  Description of Artificial Sequence: Synthetic oligonucleotide
aaaaagttgcatggtgctgg

SEQ ID NO: 495 - DNA, 21 bp, Artificial Sequence
  Description of Artificial Sequence: Synthetic oligonucleotide
aaaacaagcggctaggagttc

SEQ ID NO: 496 - DNA, 20 bp, Artificial Sequence
  Description of Artificial Sequence: Synthetic oligonucleotide
aaacaagcggctaggagttc

SEQ ID NO: 497 - DNA, 20 bp, Artificial Sequence
  Description of Artificial Sequence: Synthetic oligonucleotide
aaagaatttggagctactgt

SEQ ID NO: 498 - DNA, 20 bp, Artificial Sequence
  Description of Artificial Sequence: Synthetic oligonucleotide
aaagccaaacagtgggggaa

SEQ ID NO: 499 - DNA, 20 bp, Artificial Sequence
  Description of Artificial Sequence: Synthetic oligonucleotide
aaattgagagaagtccacca

SEQ ID NO: 500 - DNA, 20 bp, Artificial Sequence
  Description of Artificial Sequence: Synthetic oligonucleotide
aacaaatggcactagtaaac

SEQ ID NO: 501 - DNA, 20 bp, Artificial Sequence
  Description of Artificial Sequence: Synthetic oligonucleotide
aacaagaaaaaccccgcctg

SEQ ID NO: 502 - DNA, 20 bp, Artificial Sequence
  Description of Artificial Sequence: Synthetic oligonucleotide
aacagtgggggaaagcccta

SEQ ID NO: 503 - DNA, 20 bp, Artificial Sequence
  Description of Artificial Sequence: Synthetic oligonucleotide
aacatcacatcaggattcct

SEQ ID NO: 504 - DNA, 20 bp, Artificial Sequence
  Description of Artificial Sequence: Synthetic oligonucleotide
aacatggagaacatcacatc

SEQ ID NO: 505 - DNA, 20 bp, Artificial Sequence
  Description of Artificial Sequence: Synthetic oligonucleotide
aacccccactggctggggct

SEQ ID NO: 506 - DNA, 20 bp, Artificial Sequence
  Description of Artificial Sequence: Synthetic oligonucleotide
aagaagatgaggcatagcag

SEQ ID NO: 507 - DNA, 21 bp, Artificial Sequence
  Description of Artificial Sequence: Synthetic oligonucleotide
aagaagtcagaaggcaaaaac

SEQ ID NO: 508 - DNA, 20 bp, Artificial Sequence
  Description of Artificial Sequence: Synthetic oligonucleotide
aagaatcctcacaataccgc

SEQ ID NO: 509 - DNA, 20 bp, Artificial Sequence
  Description of Artificial Sequence: Synthetic oligonucleotide
aagaatttggagctactgtg

SEQ ID NO: 510 - DNA, 20 bp, Artificial Sequence
  Description of Artificial Sequence: Synthetic oligonucleotide
aaggaaagaagtcagaaggc

SEQ ID NO: 511 - DNA, 20 bp, Artificial Sequence
  Description of Artificial Sequence: Synthetic oligonucleotide
aattgagagaagtccaccac

SEQ ID NO: 512 - DNA, 20 bp, Artificial Sequence
  Description of Artificial Sequence: Synthetic oligonucleotide
acaaatggcactagtaaact

SEQ ID NO: 513 - DNA, 21 bp, Artificial Sequence
  Description of Artificial Sequence: Synthetic oligonucleotide
acaagaatcctcacaataccg

SEQ ID NO: 514 - DNA, 21 bp, Artificial Sequence
  Description of Artificial Sequence: Synthetic oligonucleotide
acacatccagcgataaccagg

SEQ ID NO: 515 - DNA, 20 bp, Artificial Sequence
  Description of Artificial Sequence: Synthetic oligonucleotide
acaggaggttggtgagtgat

SEQ ID NO: 516 - DNA, 21 bp, Artificial Sequence
  Description of Artificial Sequence: Synthetic oligonucleotide
acaggaggttggtgagtgatt

SEQ ID NO: 517 - DNA, 20 bp, Artificial Sequence
  Description of Artificial Sequence: Synthetic oligonucleotide
acagtgggggaaagccctac

SEQ ID NO: 518 - DNA, 20 bp, Artificial Sequence
  Description of Artificial Sequence: Synthetic oligonucleotide
acatggagaacatcacatca

SEQ ID NO: 519 - DNA, 20 bp, Artificial Sequence
  Description of Artificial Sequence: Synthetic oligonucleotide
acatttaaaccctaacaaaa

SEQ ID NO: 520 - DNA, 20 bp, Artificial Sequence
  Description of Artificial Sequence: Synthetic oligonucleotide
acgcaacccccactggctgg

SEQ ID NO: 521 - DNA, 20 bp, Artificial Sequence
  Description of Artificial Sequence: Synthetic oligonucleotide
agaacatcacatcaggattc

SEQ ID NO: 522 - DNA, 20 bp, Artificial Sequence
  Description of Artificial Sequence: Synthetic oligonucleotide
agaagatgaggcatagcagc

SEQ ID NO: 523 - DNA, 20 bp, Artificial Sequence
  Description of Artificial Sequence: Synthetic oligonucleotide
agaaggggacgagagagtcc

SEQ ID NO: 524 - DNA, 21 bp, Artificial Sequence
  Description of Artificial Sequence: Synthetic oligonucleotide
agacaaaagaaaattggtaac

SEQ ID NO: 525 - DNA, 20 bp, Artificial Sequence
  Description of Artificial Sequence: Synthetic oligonucleotide
agacacatccagcgataacc

SEQ ID NO: 526 - DNA, 20 bp, Artificial Sequence
  Description of Artificial Sequence: Synthetic oligonucleotide
agacggagaaggggacgaga

SEQ ID NO: 527 - DNA, 20 bp, Artificial Sequence
  Description of Artificial Sequence: Synthetic oligonucleotide
agagaagtccaccacgagtc

SEQ ID NO: 528 - DNA, 20 bp, Artificial Sequence
  Description of Artificial Sequence: Synthetic oligonucleotide
agagaggtgcgccccgtggt

SEQ ID NO: 529 - DNA, 20 bp, Artificial Sequence
  Description of Artificial Sequence: Synthetic oligonucleotide
agatgagaaggcacagacgg

SEQ ID NO: 530 - DNA, 20 bp, Artificial Sequence
  Description of Artificial Sequence: Synthetic oligonucleotide
agcgccgacgggacgtaaac

SEQ ID NO: 531 - DNA, 21 bp, Artificial Sequence
  Description of Artificial Sequence: Synthetic oligonucleotide
agctccaaattctttataagg

SEQ ID NO: 532 - DNA, 20 bp, Artificial Sequence
  Description of Artificial Sequence: Synthetic oligonucleotide
aggaaagaagtcagaaggca

SEQ ID NO: 533 - DNA, 20 bp, Artificial Sequence
  Description of Artificial Sequence: Synthetic oligonucleotide
aggaggttggtgagtgattg

SEQ ID NO: 534 - DNA, 21 bp, Artificial Sequence
  Description of Artificial Sequence: Synthetic oligonucleotide
aggcaaaaacgagagtaactc

SEQ ID NO: 535 - DNA, 20 bp, Artificial Sequence
  Description of Artificial Sequence: Synthetic oligonucleotide
aggcatagcagcaggatgaa

SEQ ID NO: 536 - DNA, 20 bp, Artificial Sequence
  Description of Artificial Sequence: Synthetic oligonucleotide
agggtttaaatgtataccca

SEQ ID NO: 537 - DNA, 21 bp, Artificial Sequence
  Description of Artificial Sequence: Synthetic oligonucleotide
aggtatgttgcccgtttgtcc

SEQ ID NO: 538 - DNA, 20 bp, Artificial Sequence
  Description of Artificial Sequence: Synthetic oligonucleotide
agtaactccacagtagctcc

SEQ ID NO: 539 - DNA, 20 bp, Artificial Sequence
  Description of Artificial Sequence: Synthetic oligonucleotide
agtccccaacctccaatcac

SEQ ID NO: 540 - DNA, 21 bp, Artificial Sequence
  Description of Artificial Sequence: Synthetic oligonucleotide
agtgattggaggttggggact

SEQ ID NO: 541 - DNA, 20 bp, Artificial Sequence
  Description of Artificial Sequence: Synthetic oligonucleotide
agtgcgaatccacactccga

SEQ ID NO: 542 - DNA, 20 bp, Artificial Sequence
  Description of Artificial Sequence: Synthetic oligonucleotide
agtgtggattcgcactcctc

SEQ ID NO: 543 - DNA, 21 bp, Artificial Sequence
  Description of Artificial Sequence: Synthetic oligonucleotide
ataaagaatttggagctactg

SEQ ID NO: 544 - DNA, 20 bp, Artificial Sequence
  Description of Artificial Sequence: Synthetic oligonucleotide
ataaattggtctgcgcacca

SEQ ID NO: 545 - DNA, 20 bp, Artificial Sequence
  Description of Artificial Sequence: Synthetic oligonucleotide
atatggatgatgtggtattg

SEQ ID NO: 546 - DNA, 20 bp, Artificial Sequence
  Description of Artificial Sequence: Synthetic oligonucleotide
atgaggcatagcagcaggat

SEQ ID NO: 547 - DNA, 20 bp, Artificial Sequence
  Description of Artificial Sequence: Synthetic oligonucleotide
atgatgtggtattgggggcc

SEQ ID NO: 548 - DNA, 20 bp, Artificial Sequence
  Description of Artificial Sequence: Synthetic oligonucleotide
atggatgatgtggtattggg

SEQ ID NO: 549 - DNA, 20 bp, Artificial Sequence
  Description of Artificial Sequence: Synthetic oligonucleotide
atgggatgggaatacaggtg

SEQ ID NO: 550 - DNA, 20 bp, Artificial Sequence
  Description of Artificial Sequence: Synthetic oligonucleotide
attcagcgccgacgggacgt

SEQ ID NO: 551 - DNA, 20 bp, Artificial Sequence
  Description of Artificial Sequence: Synthetic oligonucleotide
attgtgaggattcttgtcaa

SEQ ID NO: 552 - DNA, 21 bp, Artificial Sequence
  Description of Artificial Sequence: Synthetic oligonucleotide
atttaaaccctaacaaaacaa

SEQ ID NO: 553 - DNA, 20 bp, Artificial Sequence
  Description of Artificial Sequence: Synthetic oligonucleotide
caaaaacgagagtaactcca

SEQ ID NO: 554 - DNA, 20 bp, Artificial Sequence
  Description of Artificial Sequence: Synthetic oligonucleotide
caaaagaaaattggtaacag

SEQ ID NO: 555 - DNA, 21 bp, Artificial Sequence
  Description of Artificial Sequence: Synthetic oligonucleotide
caaaattcgcagtccccaacc

SEQ ID NO: 556 - DNA, 20 bp, Artificial Sequence
  Description of Artificial Sequence: Synthetic oligonucleotide
caagaatcctcacaataccg

SEQ ID NO: 557 - DNA, 21 bp, Artificial Sequence
  Description of Artificial Sequence: Synthetic oligonucleotide
caataccgcagagtctagact

SEQ ID NO: 558 - DNA, 20 bp, Artificial Sequence
  Description of Artificial Sequence: Synthetic oligonucleotide
cagacacatccagcgataac

SEQ ID NO: 559 - DNA, 20 bp, Artificial Sequence
  Description of Artificial Sequence: Synthetic oligonucleotide
cagacggagaaggggacgag

SEQ ID NO: 560 - DNA, 20 bp, Artificial Sequence
  Description of Artificial Sequence: Synthetic oligonucleotide
caggaggttggtgagtgatt

SEQ ID NO: 561 - DNA, 20 bp, Artificial Sequence
  Description of Artificial Sequence: Synthetic oligonucleotide
cataaattggtctgcgcacc

SEQ ID NO: 562 - DNA, 20 bp, Artificial Sequence
  Description of Artificial Sequence: Synthetic oligonucleotide
catttaaaccctaacaaaac

SEQ ID NO: 563 - DNA, 20 bp, Artificial Sequence
  Description of Artificial Sequence: Synthetic oligonucleotide
cccaacctccaatcactcac

SEQ ID NO: 564 - DNA, 20 bp, Artificial Sequence
  Description of Artificial Sequence: Synthetic oligonucleotide
cccgagattgagatcttctg

SEQ ID NO: 565 - DNA, 20 bp, Artificial Sequence
  Description of Artificial Sequence: Synthetic oligonucleotide
ccctagaagaagaactccct

SEQ ID NO: 566 - DNA, 20 bp, Artificial Sequence
  Description of Artificial Sequence: Synthetic oligonucleotide
cctagaaaattgagagaagt

SEQ ID NO: 567 - DNA, 20 bp, Artificial Sequence
  Description of Artificial Sequence: Synthetic oligonucleotide
cctcacaataccgcagagtc

SEQ ID NO: 568 - DNA, 20 bp, Artificial Sequence
  Description of Artificial Sequence: Synthetic oligonucleotide
cctgaactggagccaccagc

SEQ ID NO: 569 - DNA, 20 bp, Artificial Sequence
  Description of Artificial Sequence: Synthetic oligonucleotide
cgaattttggccaagacaca

SEQ ID NO: 570 - DNA, 20 bp, Artificial Sequence
  Description of Artificial Sequence: Synthetic oligonucleotide
cgagcaaaacaagcggctag

SEQ ID NO: 571 - DNA, 20 bp, Artificial Sequence
  Description of Artificial Sequence: Synthetic oligonucleotide
cgcagaagatctcaatctcg

SEQ ID NO: 572 - DNA, 20 bp, Artificial Sequence
  Description of Artificial Sequence: Synthetic oligonucleotide
cgcagaccaatttatgccta

SEQ ID NO: 573 - DNA, 20 bp, Artificial Sequence
  Description of Artificial Sequence: Synthetic oligonucleotide
cgccgacgggacgtaaacaa

SEQ ID NO: 574 - DNA, 20 bp, Artificial Sequence
  Description of Artificial Sequence: Synthetic oligonucleotide
ctcacaataccgcagagtct

SEQ ID NO: 575 - DNA, 20 bp, Artificial Sequence
  Description of Artificial Sequence: Synthetic oligonucleotide
ctcaccaacctcctgtcctc

SEQ ID NO: 576 - DNA, 20 bp, Artificial Sequence
  Description of Artificial Sequence: Synthetic oligonucleotide
ctgaaagccaaacagtgggg

SEQ ID NO: 577 - DNA, 21 bp, Artificial Sequence
  Description of Artificial Sequence: Synthetic oligonucleotide
ctgaactggagccaccagcag

SEQ ID NO: 578 - DNA, 20 bp, Artificial Sequence
  Description of Artificial Sequence: Synthetic oligonucleotide
ctgacgcaacccccactggc

SEQ ID NO: 579 - DNA, 21 bp, Artificial Sequence
  Description of Artificial Sequence: Synthetic oligonucleotide
ctgcgagcaaaacaagcggct

SEQ ID NO: 580 - DNA, 20 bp, Artificial Sequence
  Description of Artificial Sequence: Synthetic oligonucleotide
ctgtgccaagtgtttgctga

SEQ ID NO: 581 - DNA, 20 bp, Artificial Sequence
  Description of Artificial Sequence: Synthetic oligonucleotide
cttgtaagttggcgagaaag

SEQ ID NO: 582 - DNA, 20 bp, Artificial Sequence
  Description of Artificial Sequence: Synthetic oligonucleotide
cttgtcaacaagaaaaaccc

SEQ ID NO: 583 - DNA, 20 bp, Artificial Sequence
  Description of Artificial Sequence: Synthetic oligonucleotide
cttgttgacaagaatcctca

SEQ ID NO: 584 - DNA, 21 bp, Artificial Sequence
  Description of Artificial Sequence: Synthetic oligonucleotide
gaaaattgagagaagtccacc

SEQ ID NO: 585 - DNA, 20 bp, Artificial Sequence
  Description of Artificial Sequence: Synthetic oligonucleotide
gaaaattggtaacagcggta

SEQ ID NO: 586 - DNA, 20 bp, Artificial Sequence
  Description of Artificial Sequence: Synthetic oligonucleotide
gaaagccaaacagtggggga

SEQ ID NO: 587 - DNA, 20 bp, Artificial Sequence
  Description of Artificial Sequence: Synthetic oligonucleotide
gaacatcacatcaggattcc

SEQ ID NO: 588 - DNA, 20 bp, Artificial Sequence
  Description of Artificial Sequence: Synthetic oligonucleotide
gaacatggagaacatcacat

SEQ ID NO: 589 - DNA, 20 bp, Artificial Sequence
  Description of Artificial Sequence: Synthetic oligonucleotide
gaagaagaactccctcgcct

SEQ ID NO: 590 - DNA, 20 bp, Artificial Sequence
  Description of Artificial Sequence: Synthetic oligonucleotide
gaagatgaggcatagcagca

SEQ ID NO: 591 - DNA, 20 bp, Artificial Sequence
  Description of Artificial Sequence: Synthetic oligonucleotide
gaaggaaagaagtcagaagg

SEQ ID NO: 592 - DNA, 20 bp, Artificial Sequence
  Description of Artificial Sequence: Synthetic oligonucleotide
gacaaaagaaaattggtaac

SEQ ID NO: 593 - DNA, 20 bp, Artificial Sequence
  Description of Artificial Sequence: Synthetic oligonucleotide
gacaaacgggcaacatacct

SEQ ID NO: 594 - DNA, 20 bp, Artificial Sequence
  Description of Artificial Sequence: Synthetic oligonucleotide
gacaagaatcctcacaatac

SEQ ID NO: 595 - DNA, 20 bp, Artificial Sequence
  Description of Artificial Sequence: Synthetic oligonucleotide
gacgcaacccccactggctg

SEQ ID NO: 596 - DNA, 20 bp, Artificial Sequence
  Description of Artificial Sequence: Synthetic oligonucleotide
gacgtaaacaaaggacgtcc

SEQ ID NO: 597 - DNA, 21 bp, Artificial Sequence
  Description of Artificial Sequence: Synthetic oligonucleotide
gagagtaactccacagtagct

SEQ ID NO: 598 - DNA, 20 bp, Artificial Sequence
  Description of Artificial Sequence: Synthetic oligonucleotide
gaggacaggaggttggtgag

SEQ ID NO: 599 - DNA, 20 bp, Artificial Sequence
  Description of Artificial Sequence: Synthetic oligonucleotide
gaggcatagcagcaggatga

SEQ ID NO: 600 - DNA, 20 bp, Artificial Sequence
  Description of Artificial Sequence: Synthetic oligonucleotide
gaggtgaaaaagttgcatgg

SEQ ID NO: 601 - DNA, 21 bp, Artificial Sequence
  Description of Artificial Sequence: Synthetic oligonucleotide
gaggtgaaaaagttgcatggt

SEQ ID NO: 602 - DNA, 20 bp, Artificial Sequence
  Description of Artificial Sequence: Synthetic oligonucleotide
gaggtgaagcgaagtgcaca

SEQ ID NO: 603 - DNA, 20 bp, Artificial Sequence
  Description of Artificial Sequence: Synthetic oligonucleotide
gagtaactccacagtagctc

SEQ ID NO: 604 - DNA, 21 bp, Artificial Sequence
  Description of Artificial Sequence: Synthetic oligonucleotide
gagtccaaggaatactaacat

SEQ ID NO: 605 - DNA, 20 bp, Artificial Sequence
  Description of Artificial Sequence: Synthetic oligonucleotide
gatgagaaggcacagacggg

SEQ ID NO: 606 - DNA, 20 bp, Artificial Sequence
  Description of Artificial Sequence: Synthetic oligonucleotide
gatgaggcatagcagcagga

SEQ ID NO: 607 - DNA, 20 bp, Artificial Sequence
  Description of Artificial Sequence: Synthetic oligonucleotide
gatgatgtggtattgggggc

SEQ ID NO: 608 - DNA, 20 bp, Artificial Sequence
  Description of Artificial Sequence: Synthetic oligonucleotide
gattcagcgccgacgggacg

SEQ ID NO: 609 - DNA, 20 bp, Artificial Sequence
  Description of Artificial Sequence: Synthetic oligonucleotide
gattggaggttggggactgc

SEQ ID NO: 610 - DNA, 20 bp, Artificial Sequence
  Description of Artificial Sequence: Synthetic oligonucleotide
gcaaacacttggcacagacc

SEQ ID NO: 611 - DNA, 20 bp, Artificial Sequence
  Description of Artificial Sequence: Synthetic oligonucleotide
gcagaagatctcaatctcgg

SEQ ID NO: 612 - DNA, 20 bp, Artificial Sequence
  Description of Artificial Sequence: Synthetic oligonucleotide
gcagacacatccagcgataa

SEQ ID NO: 613 - DNA, 20 bp, Artificial Sequence
  Description of Artificial Sequence: Synthetic oligonucleotide
gcagaccaatttatgcctac

SEQ ID NO: 614 - DNA, 20 bp, Artificial Sequence
  Description of Artificial Sequence: Synthetic oligonucleotide
gcataaattggtctgcgcac

SEQ ID NO: 615 - DNA, 20 bp, Artificial Sequence
  Description of Artificial Sequence: Synthetic oligonucleotide
gcccaaggtcttacataaga

SEQ ID NO: 616 - DNA, 20 bp, Artificial Sequence
  Description of Artificial Sequence: Synthetic oligonucleotide
gccgacgggacgtaaacaaa

SEQ ID NO: 617 - DNA, 20 bp, Artificial Sequence
  Description of Artificial Sequence: Synthetic oligonucleotide
gccgcagacacatccagcga

SEQ ID NO: 618 - DNA, 20 bp, Artificial Sequence
  Description of Artificial Sequence: Synthetic oligonucleotide
gcgaatccacactccgaaag

SEQ ID NO: 619 - DNA, 20 bp, Artificial Sequence
  Description of Artificial Sequence: Synthetic oligonucleotide
gcgagcaaaacaagcggcta

SEQ ID NO: 620 - DNA, 20 bp, Artificial Sequence
  Description of Artificial Sequence: Synthetic oligonucleotide
gcgccgacgggacgtaaaca

SEQ ID NO: 621 - DNA, 20 bp, Artificial Sequence
  Description of Artificial Sequence: Synthetic oligonucleotide
ggaaagaagtcagaaggcaa

SEQ ID NO: 622 - DNA, 21 bp, Artificial Sequence
  Description of Artificial Sequence: Synthetic oligonucleotide
ggcagacggagaaggggacga

SEQ ID NO: 623 - DNA, 20 bp, Artificial Sequence
  Description of Artificial Sequence: Synthetic oligonucleotide
ggcatagcagcaggatgaag

SEQ ID NO: 624 - DNA, 20 bp, Artificial Sequence
  Description of Artificial Sequence: Synthetic oligonucleotide
ggggactgcgaattttggcc

SEQ ID NO: 625 - DNA, 20 bp, Artificial Sequence
  Description of Artificial Sequence: Synthetic oligonucleotide
ggggcatttggtggtctata

SEQ ID NO: 626 - DNA, 20 bp, Artificial Sequence
  Description of Artificial Sequence: Synthetic oligonucleotide
ggtatacatttaaaccctaa

SEQ ID NO: 627 - DNA, 20 bp, Artificial Sequence
  Description of Artificial Sequence: Synthetic oligonucleotide
ggtgagtgattggaggttgg

SEQ ID NO: 628 - DNA, 20 bp, Artificial Sequence
  Description of Artificial Sequence: Synthetic oligonucleotide
gtaaacaaaggacgtcccgc

SEQ ID NO: 629 - DNA, 21 bp, Artificial Sequence
  Description of Artificial Sequence: Synthetic oligonucleotide
gtaaacaaaggacgtcccgcg

SEQ ID NO: 630 - DNA, 20 bp, Artificial Sequence
  Description of Artificial Sequence: Synthetic oligonucleotide
gtaggcataaattggtctgc

SEQ ID NO: 631 - DNA, 20 bp, Artificial Sequence
  Description of Artificial Sequence: Synthetic oligonucleotide
gtatacatttaaaccctaac

SEQ ID NO: 632 - DNA, 20 bp, Artificial Sequence
  Description of Artificial Sequence: Synthetic oligonucleotide
gtccaaggaatactaacatt

SEQ ID NO: 633 - DNA, 20 bp, Artificial Sequence
  Description of Artificial Sequence: Synthetic oligonucleotide
gtctagactctgcggtattg

SEQ ID NO: 634 - DNA, 21 bp, Artificial Sequence
  Description of Artificial Sequence: Synthetic oligonucleotide
gtctagactctgcggtattgt

SEQ ID NO: 635 - DNA, 20 bp, Artificial Sequence
  Description of Artificial Sequence: Synthetic oligonucleotide
gtgaaaaagttgcatggtgc

SEQ ID NO: 636 - DNA, 20 bp, Artificial Sequence
  Description of Artificial Sequence: Synthetic oligonucleotide
gtgaggattcttgtcaacaa

SEQ ID NO: 637 - DNA, 20 bp, Artificial Sequence
  Description of Artificial Sequence: Synthetic oligonucleotide
gtgccaagtgtttgctgacg

SEQ ID NO: 638 - DNA, 20 bp, Artificial Sequence
  Description of Artificial Sequence: Synthetic oligonucleotide
gtgcgaatccacactccgaa

SEQ ID NO: 639 - DNA, 20 bp, Artificial Sequence
  Description of Artificial Sequence: Synthetic oligonucleotide
gtgtggattcgcactcctcc

SEQ ID NO: 640 - DNA, 20 bp, Artificial Sequence
  Description of Artificial Sequence: Synthetic oligonucleotide
gttaatcattacttccaaac

SEQ ID NO: 641 - DNA, 21 bp, Artificial Sequence
  Description of Artificial Sequence: Synthetic oligonucleotide
gttaccaattttcttttgtct

SEQ ID NO: 642 - DNA, 20 bp, Artificial Sequence
  Description of Artificial Sequence: Synthetic oligonucleotide
gttagtattccttggactca

SEQ ID NO: 643 - DNA, 20 bp, Artificial Sequence
  Description of Artificial Sequence: Synthetic oligonucleotide
gttggtgagtgattggaggt

SEQ ID NO: 644 - DNA, 20 bp, Artificial Sequence
  Description of Artificial Sequence: Synthetic oligonucleotide
gtttacgtcccgtcggcgct

SEQ ID NO: 645 - DNA, 20 bp, Artificial Sequence
  Description of Artificial Sequence: Synthetic oligonucleotide
taaacaaaggacgtcccgcg

SEQ ID NO: 646 - DNA, 20 bp, Artificial Sequence
  Description of Artificial Sequence: Synthetic oligonucleotide
taaagaatttggagctactg

SEQ ID NO: 647 - DNA, 20 bp, Artificial Sequence
  Description of Artificial Sequence: Synthetic oligonucleotide
tactagtgccatttgttcag

SEQ ID NO: 648 - DNA, 21 bp, Artificial Sequence
  Description of Artificial Sequence: Synthetic oligonucleotide
tagcagcaggatgaagaggaa

SEQ ID NO: 649 - DNA, 20 bp, Artificial Sequence
  Description of Artificial Sequence: Synthetic oligonucleotide
tatacatttaaaccctaaca

SEQ ID NO: 650 - DNA, 20 bp, Artificial Sequence
  Description of Artificial Sequence: Synthetic oligonucleotide
tatatggatgatgtggtatt

SEQ ID NO: 651 - DNA, 20 bp, Artificial Sequence
  Description of Artificial Sequence: Synthetic oligonucleotide
tcctgaactggagccaccag

SEQ ID NO: 652 - DNA, 20 bp, Artificial Sequence
  Description of Artificial Sequence: Synthetic oligonucleotide
tctagactctgcggtattgt

SEQ ID NO: 653 - DNA, 20 bp, Artificial Sequence
  Description of Artificial Sequence: Synthetic oligonucleotide
tgaaagccaaacagtggggg

SEQ ID NO: 654 - DNA, 20 bp, Artificial Sequence
  Description of Artificial Sequence: Synthetic oligonucleotide
tgacgcaacccccactggct

SEQ ID NO: 655 - DNA, 20 bp, Artificial Sequence
  Description of Artificial Sequence: Synthetic oligonucleotide
tgattggaggttggggactg

SEQ ID NO: 656 - DNA, 20 bp, Artificial Sequence
  Description of Artificial Sequence: Synthetic oligonucleotide
tgcccaaggtcttacataag

SEQ ID NO: 657 - DNA, 21 bp, Artificial Sequence
  Description of Artificial Sequence: Synthetic oligonucleotide
tggatgatgtggtattggggg

SEQ ID NO: 658 - DNA, 20 bp, Artificial Sequence
  Description of Artificial Sequence: Synthetic oligonucleotide
tggggactgcgaattttggc

SEQ ID NO: 659 - DNA, 20 bp, Artificial Sequence
  Description of Artificial Sequence: Synthetic oligonucleotide
tggtgagtgattggaggttg

SEQ ID NO: 660 - DNA, 20 bp, Artificial Sequence
  Description of Artificial Sequence: Synthetic oligonucleotide
tgtaagttggcgagaaagtg

SEQ ID NO: 661 - DNA, 20 bp, Artificial Sequence
  Description of Artificial Sequence: Synthetic oligonucleotide
tgtaggcataaattggtctg

SEQ ID NO: 662 - DNA, 20 bp, Artificial Sequence
  Description of Artificial Sequence: Synthetic oligonucleotide
tgtgaggattcttgtcaaca

SEQ ID NO: 663 - DNA, 20 bp, Artificial Sequence
  Description of Artificial Sequence: Synthetic oligonucleotide
tgtggagttactctcgtttt

SEQ ID NO: 664 - DNA, 21 bp, Artificial Sequence
  Description of Artificial Sequence: Synthetic oligonucleotide
tgttagtattccttggactca

SEQ ID NO: 665 - DNA, 20 bp, Artificial Sequence
  Description of Artificial Sequence: Synthetic oligonucleotide
tgtttacgtcccgtcggcgc

SEQ ID NO: 666 - DNA, 20 bp, Artificial Sequence
  Description of Artificial Sequence: Synthetic oligonucleotide
ttaaaccctaacaaaacaaa

SEQ ID NO: 667 - DNA, 20 bp, Artificial Sequence
  Description of Artificial Sequence: Synthetic oligonucleotide
ttcccccactgtttggcttt

SEQ ID NO: 668 - DNA, 20 bp, Artificial Sequence
  Description of Artificial Sequence: Synthetic oligonucleotide
ttgctgacgcaacccccact

SEQ ID NO: 669 - DNA, 21 bp, Artificial Sequence
  Description of Artificial Sequence: Synthetic oligonucleotide
ttggaggacaggaggttggtg

SEQ ID NO: 670 - DNA, 20 bp, Artificial Sequence
  Description of Artificial Sequence: Synthetic oligonucleotide
ttggtgagtgattggaggtt

SEQ ID NO: 671 - DNA, 20 bp, Artificial Sequence
  Description of Artificial Sequence: Synthetic oligonucleotide
ttgtaagttggcgagaaagt

SEQ ID NO: 672 - DNA, 20 bp, Artificial Sequence
  Description of Artificial Sequence: Synthetic oligonucleotide
ttgtgaggattcttgtcaac

SEQ ID NO: 673 - DNA, 21 bp, Artificial Sequence
  Description of Artificial Sequence: Synthetic oligonucleotide
tttgtttacgtcccgtcggcg

SEQ ID NO: 674 - DNA, 20 bp, Artificial Sequence
  Description of Artificial Sequence: Synthetic oligonucleotide
aagccccagccagtgggggt

SEQ ID NO: 675 - DNA, 20 bp, Artificial Sequence
  Description of Artificial Sequence: Synthetic oligonucleotide
aaggggacgagagagtccca

SEQ ID NO: 676 - DNA, 20 bp, Artificial Sequence
  Description of Artificial Sequence: Synthetic oligonucleotide
aagtcagaaggcaaaaacga

SEQ ID NO: 677 - DNA, 20 bp, Artificial Sequence
  Description of Artificial Sequence: Synthetic oligonucleotide
aattcgcagtccccaacctc

SEQ ID NO: 678 - DNA, 20 bp, Artificial Sequence
  Description of Artificial Sequence: Synthetic oligonucleotide
acaagcggctaggagttccg

SEQ ID NO: 679 - DNA, 20 bp, Artificial Sequence
  Description of Artificial Sequence: Synthetic oligonucleotide
acatccagcgataaccagga

SEQ ID NO: 680 - DNA, 20 bp, Artificial Sequence
  Description of Artificial Sequence: Synthetic oligonucleotide
agaagtcagaaggcaaaaac

SEQ ID NO: 681 - DNA, 20 bp, Artificial Sequence
  Description of Artificial Sequence: Synthetic oligonucleotide
agaatcctcacaataccgca

SEQ ID NO: 682 - DNA, 21 bp, Artificial Sequence
  Description of Artificial Sequence: Synthetic oligonucleotide
agcggctaggagttccgcagt

SEQ ID NO: 683 - DNA, 20 bp, Artificial Sequence
  Description of Artificial Sequence: Synthetic oligonucleotide
agggctttcccccactgttt

SEQ ID NO: 684 - DNA, 20 bp, Artificial Sequence
  Description of Artificial Sequence: Synthetic oligonucleotide
agtagctccaaattctttat

SEQ ID NO: 685 - DNA, 20 bp, Artificial Sequence
  Description of Artificial Sequence: Synthetic oligonucleotide
attccttggactcataaggt

SEQ ID NO: 686 - DNA, 20 bp, Artificial Sequence
  Description of Artificial Sequence: Synthetic oligonucleotide
caatgctcaggagactctaa

SEQ ID NO: 687 - DNA, 20 bp, Artificial Sequence
  Description of Artificial Sequence: Synthetic oligonucleotide
cagccagtgggggttgcgtc

SEQ ID NO: 688 - DNA, 20 bp, Artificial Sequence
  Description of Artificial Sequence: Synthetic oligonucleotide
cagcgccgacgggacgtaaa

SEQ ID NO: 689 - DNA, 20 bp, Artificial Sequence
  Description of Artificial Sequence: Synthetic oligonucleotide
cagtagctccaaattcttta

SEQ ID NO: 690 - DNA, 21 bp, Artificial Sequence
  Description of Artificial Sequence: Synthetic oligonucleotide
cagtagctccaaattctttat

SEQ ID NO: 691 - DNA, 20 bp, Artificial Sequence
  Description of Artificial Sequence: Synthetic oligonucleotide
catagcagcaggatgaagag

SEQ ID NO: 692 - DNA, 20 bp, Artificial Sequence
  Description of Artificial Sequence: Synthetic oligonucleotide
ccagccagtgggggttgcgt

SEQ ID NO: 693 - DNA, 21 bp, Artificial Sequence
  Description of Artificial Sequence: Synthetic oligonucleotide
ccgtgtgtcttggccaaaatt

SEQ ID NO: 694 - DNA, 20 bp, Artificial Sequence
  Description of Artificial Sequence: Synthetic oligonucleotide
ccttggactcataaggtggg

SEQ ID NO: 695 - DNA, 20 bp, Artificial Sequence
  Description of Artificial Sequence: Synthetic oligonucleotide
cggctaggagttccgcagta

SEQ ID NO: 696 - DNA, 20 bp, Artificial Sequence
  Description of Artificial Sequence: Synthetic oligonucleotide
cgtcagcaaacacttggcac

SEQ ID NO: 697 - DNA, 20 bp, Artificial Sequence
  Description of Artificial Sequence: Synthetic oligonucleotide
cgtgtgtcttggccaaaatt

SEQ ID NO: 698 - DNA, 20 bp, Artificial Sequence
  Description of Artificial Sequence: Synthetic oligonucleotide
ctagccgcttgttttgctcg

SEQ ID NO: 699 - DNA, 20 bp, Artificial Sequence
  Description of Artificial Sequence: Synthetic oligonucleotide
ctctcgtccccttctccgtc

SEQ ID NO: 700 - DNA, 20 bp, Artificial Sequence
  Description of Artificial Sequence: Synthetic oligonucleotide
ctgcgagcaaaacaagcggc

SEQ ID NO: 701 - DNA, 20 bp, Artificial Sequence
  Description of Artificial Sequence: Synthetic oligonucleotide
gaactcctagccgcttgttt

SEQ ID NO: 702 - DNA, 20 bp, Artificial Sequence
  Description of Artificial Sequence: Synthetic oligonucleotide
gaagtcagaaggcaaaaacg

SEQ ID NO: 703 - DNA, 20 bp, Artificial Sequence
  Description of Artificial Sequence: Synthetic oligonucleotide
gagcctgagggctccacccc

SEQ ID NO: 704 - DNA, 20 bp, Artificial Sequence
  Description of Artificial Sequence: Synthetic oligonucleotide
gcatagcagcaggatgaaga

SEQ ID NO: 705 - DNA, 21 bp, Artificial Sequence
  Description of Artificial Sequence: Synthetic oligonucleotide
gctcaggagactctaaggctt

SEQ ID NO: 706 - DNA, 20 bp, Artificial Sequence
  Description of Artificial Sequence: Synthetic oligonucleotide
gctcctctgccgatccatac

SEQ ID NO: 707 - DNA, 20 bp, Artificial Sequence
  Description of Artificial Sequence: Synthetic oligonucleotide
gctgcgagcaaaacaagcgg

SEQ ID NO: 708 - DNA, 20 bp, Artificial Sequence
  Description of Artificial Sequence: Synthetic oligonucleotide
gtagctccaaattctttata

SEQ ID NO: 709 - DNA, 20 bp, Artificial Sequence
  Description of Artificial Sequence: Synthetic oligonucleotide
gtccaagagtcctcttatgt

SEQ ID NO: 710 - DNA, 20 bp, Artificial Sequence
  Description of Artificial Sequence: Synthetic oligonucleotide
gtcctttgtttacgtcccgt

SEQ ID NO: 711 - DNA, 20 bp, Artificial Sequence
  Description of Artificial Sequence: Synthetic oligonucleotide
gttatcgctggatgtgtctg

SEQ ID NO: 712 - DNA, 20 bp, Artificial Sequence
  Description of Artificial Sequence: Synthetic oligonucleotide
tagccgcttgttttgctcgc

SEQ ID NO: 713 - DNA, 21 bp, Artificial Sequence
  Description of Artificial Sequence: Synthetic oligonucleotide
tagccgcttgttttgctcgca

SEQ ID NO: 714 - DNA, 20 bp, Artificial Sequence
  Description of Artificial Sequence: Synthetic oligonucleotide
tagggctttcccccactgtt

SEQ ID NO: 715 - DNA, 20 bp, Artificial Sequence
  Description of Artificial Sequence: Synthetic oligonucleotide
tagtattccttggactcata

SEQ ID NO: 716 - DNA, 20 bp, Artificial Sequence
  Description of Artificial Sequence: Synthetic oligonucleotide
tatgttgcccgtttgtcctc

SEQ ID NO: 717 - DNA, 20 bp, Artificial Sequence
  Description of Artificial Sequence: Synthetic oligonucleotide
tattccttggactcataagg

SEQ ID NO: 718 - DNA, 20 bp, Artificial Sequence
  Description of Artificial Sequence: Synthetic oligonucleotide
tcctagccgcttgttttgct

SEQ ID NO: 719 - DNA, 20 bp, Artificial Sequence
  Description of Artificial Sequence: Synthetic oligonucleotide
tcctcttcatcctgctgcta

SEQ ID NO: 720 - DNA, 20 bp, Artificial Sequence
  Description of Artificial Sequence: Synthetic oligonucleotide
tgcccgtttgtcctctaatt

SEQ ID NO: 721 - DNA, 21 bp, Artificial Sequence
  Description of Artificial Sequence: Synthetic oligonucleotide
tgcccgtttgtcctctaattc

SEQ ID NO: 722 - DNA, 20 bp, Artificial Sequence
  Description of Artificial Sequence: Synthetic oligonucleotide
tgcgagcaaaacaagcggct

SEQ ID NO: 723 - DNA, 21 bp, Artificial Sequence
  Description of Artificial Sequence: Synthetic oligonucleotide
tgctggtggctccagttcagg

SEQ ID NO: 724 - DNA, 20 bp, Artificial Sequence
  Description of Artificial Sequence: Synthetic oligonucleotide
tggttatcgctggatgtgtc

SEQ ID NO: 725 - DNA, 20 bp, Artificial Sequence
  Description of Artificial Sequence: Synthetic oligonucleotide
tgtgtcttggccaaaattcg

SEQ ID NO: 726 - DNA, 20 bp, Artificial Sequence
  Description of Artificial Sequence: Synthetic oligonucleotide
ttactctcgtttttgccttc

SEQ ID NO: 727 - DNA, 20 bp, Artificial Sequence
  Description of Artificial Sequence: Synthetic oligonucleotide
ttatcgctggatgtgtctgc

SEQ ID NO: 728 - DNA, 21 bp, Artificial Sequence
  Description of Artificial Sequence: Synthetic oligonucleotide
aacaagatctacagcatgggg

SEQ ID NO: 729 - DNA, 21 bp, Artificial Sequence
  Description of Artificial Sequence: Synthetic oligonucleotide
aaccccatctctttgttttgt

SEQ ID NO: 730 - DNA, 21 bp, Artificial Sequence
  Description of Artificial Sequence: Synthetic oligonucleotide
accaggacaagttggaggaca

SEQ ID NO: 731 - DNA, 21 bp, Artificial Sequence
  Description of Artificial Sequence: Synthetic oligonucleotide
atttacaccaagacattatca

SEQ ID NO: 732 - DNA, 21 bp, Artificial Sequence
  Description of Artificial Sequence: Synthetic oligonucleotide
catccatataactgaaagcca

SEQ ID NO: 733 - DNA, 21 bp, Artificial Sequence
  Description of Artificial Sequence: Synthetic oligonucleotide
ccagccttcagagcaaacaca

SEQ ID NO: 734 - DNA, 21 bp, Artificial Sequence
  Description of Artificial Sequence: Synthetic oligonucleotide
cccacccaggtagctagagtc

SEQ ID NO: 735 - DNA, 21 bp, Artificial Sequence
  Description of Artificial Sequence: Synthetic oligonucleotide
ccccagcaaagaattgcttgc

SEQ ID NO: 736 - DNA, 21 bp, Artificial Sequence
  Description of Artificial Sequence: Synthetic oligonucleotide
ccgccttccatagagtgtgta

SEQ ID NO: 737 - DNA, 21 bp, Artificial Sequence
  Description of Artificial Sequence: Synthetic oligonucleotide
ccggcaacggccaggtctgtg

SEQ ID NO: 738 - DNA, 21 bp, Artificial Sequence
  Description of Artificial Sequence: Synthetic oligonucleotide
gaaagcccaggatgatgggat

SEQ ID NO: 739 - DNA, 21 bp, Artificial Sequence
  Description of Artificial Sequence: Synthetic oligonucleotide
gaagatctcaatctcgggaac

SEQ ID NO: 740 - DNA, 21 bp, Artificial Sequence
  Description of Artificial Sequence: Synthetic oligonucleotide
gaatccacactccgaaagaca

SEQ ID NO: 741 - DNA, 21 bp, Artificial Sequence
  Description of Artificial Sequence: Synthetic oligonucleotide
gattgcaattgattatgcctg

SEQ ID NO: 742 - DNA, 21 bp, Artificial Sequence
  Description of Artificial Sequence: Synthetic oligonucleotide
gccacaagaacacatcataca

SEQ ID NO: 743 - DNA, 21 bp, Artificial Sequence
  Description of Artificial Sequence: Synthetic oligonucleotide
ggtctcaatcgccgcgtcgca

SEQ ID NO: 744 - DNA, 21 bp, Artificial Sequence
  Description of Artificial Sequence: Synthetic oligonucleotide
ggtggtctccatgcgacgtgc

SEQ ID NO: 745 - DNA, 21 bp, Artificial Sequence
  Description of Artificial Sequence: Synthetic oligonucleotide
gttttccaatgaggattaaag

SEQ ID NO: 746 - DNA, 21 bp, Artificial Sequence
  Description of Artificial Sequence: Synthetic oligonucleotide
tacacaatgtggttatcctgc

SEQ ID NO: 747 - DNA, 21 bp, Artificial Sequence
  Description of Artificial Sequence: Synthetic oligonucleotide
tactttccaatcaataggcct

SEQ ID NO: 748 - DNA, 21 bp, Artificial Sequence
  Description of Artificial Sequence: Synthetic oligonucleotide
tatacccaaagacaaaagaaa

SEQ ID NO: 749 - DNA, 21 bp, Artificial Sequence
  Description of Artificial Sequence: Synthetic oligonucleotide
tcccaagaatatggtgaccca

SEQ ID NO: 750 - DNA, 21 bp, Artificial Sequence
  Description of Artificial Sequence: Synthetic oligonucleotide
tccccaatcctcgagaagatt

SEQ ID NO: 751 - DNA, 21 bp, Artificial Sequence
  Description of Artificial Sequence: Synthetic oligonucleotide
tgaacagtttgtaggcccact

SEQ ID NO: 752 - DNA, 21 bp, Artificial Sequence
  Description of Artificial Sequence: Synthetic oligonucleotide
tgctgtaccaaaccttcggac

SEQ ID NO: 753 - DNA, 21 bp, Artificial Sequence
  Description of Artificial Sequence: Synthetic oligonucleotide
tgtcaacgaattgtgggtctt

SEQ ID NO: 754 - DNA, 21 bp, Artificial Sequence
  Description of Artificial Sequence: Synthetic oligonucleotide
ttcagagcaaacacagcaaat

SEQ ID NO: 755 - DNA, 20 bp, Artificial Sequence
  Description of Artificial Sequence: Synthetic oligonucleotide
aaccaggacaagttggagga

SEQ ID NO: 756 - DNA, 20 bp, Artificial Sequence
  Description of Artificial Sequence: Synthetic oligonucleotide
aactctgcaagatcccagag

SEQ ID NO: 757 - DNA, 21 bp, Artificial Sequence
  Description of Artificial Sequence: Synthetic oligonucleotide
aatgtatacccaaagacaaaa

SEQ ID NO: 758 - DNA, 20 bp, Artificial Sequence
  Description of Artificial Sequence: Synthetic oligonucleotide
acatcatccatataactgaa

SEQ ID NO: 759 - DNA, 20 bp, Artificial Sequence
  Description of Artificial Sequence: Synthetic oligonucleotide
acccaaagacaaaagaaaat

SEQ ID NO: 760 - DNA, 20 bp, Artificial Sequence
  Description of Artificial Sequence: Synthetic oligonucleotide
acccaggtagctagagtcat

SEQ ID NO: 761 - DNA, 20 bp, Artificial Sequence
  Description of Artificial Sequence: Synthetic oligonucleotide
acctcaatgttagtattcct

SEQ ID NO: 762 - DNA, 20 bp, Artificial Sequence
  Description of Artificial Sequence: Synthetic oligonucleotide
acgacgaggcaggtccccta

SEQ ID NO: 763 - DNA, 20 bp, Artificial Sequence
  Description of Artificial Sequence: Synthetic oligonucleotide
actcccataggaattttccg

SEQ ID NO: 764 - DNA, 20 bp, Artificial Sequence
  Description of Artificial Sequence: Synthetic oligonucleotide
actcctcccagtctttaaac

SEQ ID NO: 765 - DNA, 20 bp, Artificial Sequence
  Description of Artificial Sequence: Synthetic oligonucleotide
actctgcaagatcccagagt

SEQ ID NO: 766 - DNA, 20 bp, Artificial Sequence
  Description of Artificial Sequence: Synthetic oligonucleotide
agacgacgaggcaggtcccc

SEQ ID NO: 767 - DNA, 20 bp, Artificial Sequence
  Description of Artificial Sequence: Synthetic oligonucleotide
agattgcaattgattatgcc

SEQ ID NO: 768 - DNA, 20 bp, Artificial Sequence
  Description of Artificial Sequence: Synthetic oligonucleotide
agccaggagaaacgggctga

SEQ ID NO: 769 - DNA, 20 bp, Artificial Sequence
  Description of Artificial Sequence: Synthetic oligonucleotide
agcccaggatgatgggatgg

SEQ ID NO: 770 - DNA, 20 bp, Artificial Sequence
  Description of Artificial Sequence: Synthetic oligonucleotide
agccttcagagcaaacacag

SEQ ID NO: 771 - DNA, 20 bp, Artificial Sequence
  Description of Artificial Sequence: Synthetic oligonucleotide
agcgataaccaggacaagtt

SEQ ID NO: 772 - DNA, 20 bp, Artificial Sequence
  Description of Artificial Sequence: Synthetic oligonucleotide
aggtctcaatcgccgcgtcg

SEQ ID NO: 773 - DNA, 20 bp, Artificial Sequence
  Description of Artificial Sequence: Synthetic oligonucleotide
atactacaaactttgccagc

SEQ ID NO: 774 - DNA, 20 bp, Artificial Sequence
  Description of Artificial Sequence: Synthetic oligonucleotide
atccacactccgaaagacac

SEQ ID NO: 775 - DNA, 20 bp, Artificial Sequence
  Description of Artificial Sequence: Synthetic oligonucleotide
atccagttggcagcacagcc

SEQ ID NO: 776 - DNA, 20 bp, Artificial Sequence
  Description of Artificial Sequence: Synthetic oligonucleotide
atggggcagaatctttccac

SEQ ID NO: 777 - DNA, 21 bp, Artificial Sequence
  Description of Artificial Sequence: Synthetic oligonucleotide
atggggcagaatctttccacc

SEQ ID NO: 778 - DNA, 20 bp, Artificial Sequence
  Description of Artificial Sequence: Synthetic oligonucleotide
attttggccaagacacacgg

SEQ ID NO: 779 - DNA, 20 bp, Artificial Sequence
  Description of Artificial Sequence: Synthetic oligonucleotide
caaccaccagcacgggacca

SEQ ID NO: 780 - DNA, 20 bp, Artificial Sequence
  Description of Artificial Sequence: Synthetic oligonucleotide
caatcccaacaaggacacct

SEQ ID NO: 781 - DNA, 20 bp, Artificial Sequence
  Description of Artificial Sequence: Synthetic oligonucleotide
caatcgccagacaggaaggc

SEQ ID NO: 782 - DNA, 20 bp, Artificial Sequence
  Description of Artificial Sequence: Synthetic oligonucleotide
caccaaactctgcaagatcc

SEQ ID NO: 783 - DNA, 20 bp, Artificial Sequence
  Description of Artificial Sequence: Synthetic oligonucleotide
caccaatcgccagacaggaa

SEQ ID NO: 784 - DNA, 20 bp, Artificial Sequence
  Description of Artificial Sequence: Synthetic oligonucleotide
caccagcacgggaccatgcc

SEQ ID NO: 785 - DNA, 20 bp, Artificial Sequence
  Description of Artificial Sequence: Synthetic oligonucleotide
caccagttggatccagcctt

SEQ ID NO: 786 - DNA, 20 bp, Artificial Sequence
  Description of Artificial Sequence: Synthetic oligonucleotide
cactcccataggaattttcc

SEQ ID NO: 787 - DNA, 20 bp, Artificial Sequence
  Description of Artificial Sequence: Synthetic oligonucleotide
cagacgaaggtctcaatcgc

SEQ ID NO: 788 - DNA, 20 bp, Artificial Sequence
  Description of Artificial Sequence: Synthetic oligonucleotide
caggatccagttggcagcac

SEQ ID NO: 789 - DNA, 20 bp, Artificial Sequence
  Description of Artificial Sequence: Synthetic oligonucleotide
catactacaaactttgccag

SEQ ID NO: 790 - DNA, 20 bp, Artificial Sequence
  Description of Artificial Sequence: Synthetic oligonucleotide
catccagcgataaccaggac

SEQ ID NO: 791 - DNA, 20 bp, Artificial Sequence
  Description of Artificial Sequence: Synthetic oligonucleotide
catccatataactgaaagcc

SEQ ID NO: 792 - DNA, 20 bp, Artificial Sequence
  Description of Artificial Sequence: Synthetic oligonucleotide
ccaataccacatcatccata

SEQ ID NO: 793 - DNA, 20 bp, Artificial Sequence
  Description of Artificial Sequence: Synthetic oligonucleotide
ccccccagcaaagaattgct

SEQ ID NO: 794 - DNA, 20 bp, Artificial Sequence
  Description of Artificial Sequence: Synthetic oligonucleotide
cccggcaacggccaggtctg

SEQ ID NO: 795 - DNA, 20 bp, Artificial Sequence
  Description of Artificial Sequence: Synthetic oligonucleotide
ccgccttccatagagtgtgt

SEQ ID NO: 796 - DNA, 20 bp, Artificial Sequence
  Description of Artificial Sequence: Synthetic oligonucleotide
cctcaatgttagtattcctt

SEQ ID NO: 797 - DNA, 20 bp, Artificial Sequence
  Description of Artificial Sequence: Synthetic oligonucleotide
cctcccagtctttaaacaaa

SEQ ID NO: 798 - DNA, 20 bp, Artificial Sequence
  Description of Artificial Sequence: Synthetic oligonucleotide
ccttccatagagtgtgtaaa

SEQ ID NO: 799 - DNA, 20 bp, Artificial Sequence
  Description of Artificial Sequence: Synthetic oligonucleotide
cgacgaggcaggtcccctag

SEQ ID NO: 800 - DNA, 20 bp, Artificial Sequence
  Description of Artificial Sequence: Synthetic oligonucleotide
cgccaacaaggtaggagctg

SEQ ID NO: 801 - DNA, 20 bp, Artificial Sequence
  Description of Artificial Sequence: Synthetic oligonucleotide
cggacgacccttctcggggt

SEQ ID NO: 802 - DNA, 21 bp, Artificial Sequence
  Description of Artificial Sequence: Synthetic oligonucleotide
cgtctggccaggtgtccttgt

SEQ ID NO: 803 - DNA, 20 bp, Artificial Sequence
  Description of Artificial Sequence: Synthetic oligonucleotide
cgttccgaccgaccacgggg

SEQ ID NO: 804 - DNA, 21 bp, Artificial Sequence
  Description of Artificial Sequence: Synthetic oligonucleotide
ctcaatctcgggaacctcaat

SEQ ID NO: 805 - DNA, 20 bp, Artificial Sequence
  Description of Artificial Sequence: Synthetic oligonucleotide
ctccaccaatcgccagacag

SEQ ID NO: 806 - DNA, 21 bp, Artificial Sequence
  Description of Artificial Sequence: Synthetic oligonucleotide
ctccaccccaaaaggcctccg

SEQ ID NO: 807 - DNA, 20 bp, Artificial Sequence
  Description of Artificial Sequence: Synthetic oligonucleotide
ctcccataggaattttccga

SEQ ID NO: 808 - DNA, 20 bp, Artificial Sequence
  Description of Artificial Sequence: Synthetic oligonucleotide
ctctgcaagatcccagagtg

SEQ ID NO: 809 - DNA, 20 bp, Artificial Sequence
  Description of Artificial Sequence: Synthetic oligonucleotide
ctgcaagatcccagagtgag

SEQ ID NO: 810 - DNA, 20 bp, Artificial Sequence
  Description of Artificial Sequence: Synthetic oligonucleotide
ctggccaggtgtccttgttg

SEQ ID NO: 811 - DNA, 20 bp, Artificial Sequence
  Description of Artificial Sequence: Synthetic oligonucleotide
ctgtaccaaaccttcggacg

SEQ ID NO: 812 - DNA, 20 bp, Artificial Sequence
  Description of Artificial Sequence: Synthetic oligonucleotide
gaacaagatctacagcatgg

SEQ ID NO: 813 - DNA, 20 bp, Artificial Sequence
  Description of Artificial Sequence: Synthetic oligonucleotide
gagccaccagcagggaaata

SEQ ID NO: 814 - DNA, 20 bp, Artificial Sequence
  Description of Artificial Sequence: Synthetic oligonucleotide
gagccaggagaaacgggctg

SEQ ID NO: 815 - DNA, 20 bp, Artificial Sequence
  Description of Artificial Sequence: Synthetic oligonucleotide
gatctcaatctcgggaacct

SEQ ID NO: 816 - DNA, 20 bp, Artificial Sequence
  Description of Artificial Sequence: Synthetic oligonucleotide
gcaggatccagttggcagca

SEQ ID NO: 817 - DNA, 20 bp, Artificial Sequence
  Description of Artificial Sequence: Synthetic oligonucleotide
gccaacaaggtaggagctgg

SEQ ID NO: 818 - DNA, 20 bp, Artificial Sequence
  Description of Artificial Sequence: Synthetic oligonucleotide
gccacaagaacacatcatac

SEQ ID NO: 819 - DNA, 20 bp, Artificial Sequence
  Description of Artificial Sequence: Synthetic oligonucleotide
gccaccagcagggaaataca

SEQ ID NO: 820 - DNA, 21 bp, Artificial Sequence
  Description of Artificial Sequence: Synthetic oligonucleotide
gccaggtgtccttgttgggat

SEQ ID NO: 821 - DNA, 20 bp, Artificial Sequence
  Description of Artificial Sequence: Synthetic oligonucleotide
gccgttccgaccgaccacgg

SEQ ID NO: 822 - DNA, 20 bp, Artificial Sequence
  Description of Artificial Sequence: Synthetic oligonucleotide
gccttcagagcaaacacagc

SEQ ID NO: 823 - DNA, 20 bp, Artificial Sequence
  Description of Artificial Sequence: Synthetic oligonucleotide
gcgataaccaggacaagttg

SEQ ID NO: 824 - DNA, 20 bp, Artificial Sequence
  Description of Artificial Sequence: Synthetic oligonucleotide
gctccagctcctaccttgtt

SEQ ID NO: 825 - DNA, 21 bp, Artificial Sequence
  Description of Artificial Sequence: Synthetic oligonucleotide
ggcatactacaaactttgcca

SEQ ID NO: 826 - DNA, 20 bp, Artificial Sequence
  Description of Artificial Sequence: Synthetic oligonucleotide
ggctccagttcaggagcagt

SEQ ID NO: 827 - DNA, 20 bp, Artificial Sequence
  Description of Artificial Sequence: Synthetic oligonucleotide
gggcagaatctttccaccag

SEQ ID NO: 828 - DNA, 20 bp, Artificial Sequence
  Description of Artificial Sequence: Synthetic oligonucleotide
gggccatcagcgcgtgcgtg

SEQ ID NO: 829 - DNA, 20 bp, Artificial Sequence
  Description of Artificial Sequence: Synthetic oligonucleotide
gtacgagatcttctagatac

SEQ ID NO: 830 - DNA, 20 bp, Artificial Sequence
  Description of Artificial Sequence: Synthetic oligonucleotide
gtatacccaaagacaaaaga

SEQ ID NO: 831 - DNA, 20 bp, Artificial Sequence
  Description of Artificial Sequence: Synthetic oligonucleotide
gtctggccaggtgtccttgt

SEQ ID NO: 832 - DNA, 20 bp, Artificial Sequence
  Description of Artificial Sequence: Synthetic oligonucleotide
gtgaaaccacaagagttgcc

SEQ ID NO: 833 - DNA, 20 bp, Artificial Sequence
  Description of Artificial Sequence: Synthetic oligonucleotide
gtgctgccaactggatcctg

SEQ ID NO: 834 - DNA, 20 bp, Artificial Sequence
  Description of Artificial Sequence: Synthetic oligonucleotide
gtgttttccaatgaggatta

SEQ ID NO: 835 - DNA, 20 bp, Artificial Sequence
  Description of Artificial Sequence: Synthetic oligonucleotide
taaccaggacaagttggagg

SEQ ID NO: 836 - DNA, 20 bp, Artificial Sequence
  Description of Artificial Sequence: Synthetic oligonucleotide
taagcaggctttcactttct

SEQ ID NO: 837 - DNA, 20 bp, Artificial Sequence
  Description of Artificial Sequence: Synthetic oligonucleotide
tacaccaagacattatcaaa

SEQ ID NO: 838 - DNA, 21 bp, Artificial Sequence
  Description of Artificial Sequence: Synthetic oligonucleotide
tcaccaaactctgcaagatcc

SEQ ID NO: 839 - DNA, 20 bp, Artificial Sequence
  Description of Artificial Sequence: Synthetic oligonucleotide
tcaggctcagggcatactac

SEQ ID NO: 840 - DNA, 20 bp, Artificial Sequence
  Description of Artificial Sequence: Synthetic oligonucleotide
tcatccatataactgaaagc

SEQ ID NO: 841 - DNA, 20 bp, Artificial Sequence
  Description of Artificial Sequence: Synthetic oligonucleotide
tccaatcaataggcctgtta

SEQ ID NO: 842 - DNA, 20 bp, Artificial Sequence
  Description of Artificial Sequence: Synthetic oligonucleotide
tccaccaatcgccagacagg

SEQ ID NO: 843 - DNA, 20 bp, Artificial Sequence
  Description of Artificial Sequence: Synthetic oligonucleotide
tcccaacaaggacacctggc

SEQ ID NO: 844 - DNA, 20 bp, Artificial Sequence
  Description of Artificial Sequence: Synthetic oligonucleotide
tcccataggaattttccgaa

SEQ ID NO: 845 - DNA, 20 bp, Artificial Sequence
  Description of Artificial Sequence: Synthetic oligonucleotide
tcccgaccaccagttggatc

SEQ ID NO: 846 - DNA, 20 bp, Artificial Sequence
  Description of Artificial Sequence: Synthetic oligonucleotide
tcgcagacgaaggtctcaat

SEQ ID NO: 847 - DNA, 20 bp, Artificial Sequence
  Description of Artificial Sequence: Synthetic oligonucleotide
tctgcaagatcccagagtga

SEQ ID NO: 848 - DNA, 20 bp, Artificial Sequence
  Description of Artificial Sequence: Synthetic oligonucleotide
tctggccaggtgtccttgtt

SEQ ID NO: 849 - DNA, 20 bp, Artificial Sequence
  Description of Artificial Sequence: Synthetic oligonucleotide
tgaaaccacaagagttgcct

SEQ ID NO: 850 - DNA, 20 bp, Artificial Sequence
  Description of Artificial Sequence: Synthetic oligonucleotide
tgagccaggagaaacgggct

SEQ ID NO: 851 - DNA, 20 bp, Artificial Sequence
  Description of Artificial Sequence: Synthetic oligonucleotide
tgccacaagaacacatcata

SEQ ID NO: 852 - DNA, 20 bp, Artificial Sequence
  Description of Artificial Sequence: Synthetic oligonucleotide
tgccgaacctgcatgactac

SEQ ID NO: 853 - DNA, 20 bp, Artificial Sequence
  Description of Artificial Sequence: Synthetic oligonucleotide
tggctccagttcaggagcag

SEQ ID NO: 854 - DNA, 20 bp, Artificial Sequence
  Description of Artificial Sequence: Synthetic oligonucleotide
tggggcagaatctttccacc

SEQ ID NO: 855 - DNA, 20 bp, Artificial Sequence
  Description of Artificial Sequence: Synthetic oligonucleotide
tggtctccatgcgacgtgca

SEQ ID NO: 856 - DNA, 20 bp, Artificial Sequence
  Description of Artificial Sequence: Synthetic oligonucleotide
tgtaccaaaccttcggacgg

SEQ ID NO: 857 - DNA, 20 bp, Artificial Sequence
  Description of Artificial Sequence: Synthetic oligonucleotide
tgtatacccaaagacaaaag

SEQ ID NO: 858 - DNA, 20 bp, Artificial Sequence
  Description of Artificial Sequence: Synthetic oligonucleotide
ttacaccaagacattatcaa

SEQ ID NO: 859 - DNA, 20 bp, Artificial Sequence
  Description of Artificial Sequence: Synthetic oligonucleotide
ttctctcaattttctagggg

SEQ ID NO: 860 - DNA, 20 bp, Artificial Sequence
  Description of Artificial Sequence: Synthetic oligonucleotide
ttgcaattgattatgcctgc

SEQ ID NO: 861 - DNA, 20 bp, Artificial Sequence
  Description of Artificial Sequence: Synthetic oligonucleotide
tttacacaatgtggttatcc

SEQ ID NO: 862 - DNA, 20 bp, Artificial Sequence
  Description of Artificial Sequence: Synthetic oligonucleotide
tttccaatcaataggcctgt

SEQ ID NO: 863 - DNA, 20 bp, Artificial Sequence
  Description of Artificial Sequence: Synthetic oligonucleotide
tttccaatgaggattaaaga

SEQ ID NO: 864 - RNA, 100 nt, Artificial Sequence
  Description of Artificial Sequence: Synthetic polynucleotide
cugccaacuggauccugcgcguuuuagagcuagaaauagcaaguuaaaauaaggcuaguccguuaucaacuugaaaaaguggcaccgagucggugcuuuu

SEQ ID NO: 865 - RNA, 100 nt, Artificial Sequence
  Description of Artificial Sequence: Synthetic polynucleotide
gcugccaacuggauccugcgguuuuagagcuagaaauagcaaguuaaaauaaggcuaguccguuaucaacuugaaaaaguggcaccgagucggugcuuuu

SEQ ID NO: 866 - RNA, 100 nt, Artificial Sequence
  Description of Artificial Sequence: Synthetic polynucleotide
gaaagcccaggaugaugggaguuuuagagcuagaaauagcaaguuaaaauaaggcuaguccguuaucaacuugaaaaaguggcaccgagucggugcuuuu

SEQ ID NO: 867 - RNA, 100 nt, Artificial Sequence
  Description of Artificial Sequence: Synthetic polynucleotide
uccgcaguauggaucggcagguuuuagagcuagaaauagcaaguuaaaauaaggcuaguccguuaucaacuugaaaaaguggcaccgagucggugcuuuu

SEQ ID NO: 868 - RNA, 100 nt, Artificial Sequence
  Description of Artificial Sequence: Synthetic polynucleotide
gacuucucucaauuuucuagguuuuagagcuagaaauagcaaguuaaaauaaggcuaguccguuaucaacuugaaaaaguggcaccgagucggugcuuuu

SEQ ID NO: 869 - RNA, 100 nt, Artificial Sequence
  Description of Artificial Sequence: Synthetic polynucleotide
ucaaucccaacaaggacaccguuuuagagcuagaaauagcaaguuaaaauaaggcuaguccguuaucaacuugaaaaaguggcaccgagucggugcuuuu

SEQ ID NO: 870 - RNA, 100 nt, Artificial Sequence
  Description of Artificial Sequence: Synthetic polynucleotide
uccucugccgauccauacugguuuuagagcuagaaauagcaaguuaaaauaaggcuaguccguuaucaacuugaaaaaguggcaccgagucggugcuuuu

SEQ ID NO: 871 - DNA, 100 bp, Artificial Sequence
  Description of Artificial Sequence: Synthetic oligonucleotide
  Description of Combined DNA/RNA Molecule: Synthetic oligonucleotide
ccatgccccaaagccacccaguuuuagagcuagaaauagcaaguuaaaauaaggcuaguccguuaucaacuugaaaaaguggcaccgagucggugcuuuu

SEQ ID NO: 872 - DNA, 100 bp, Artificial Sequence
  Description of Artificial Sequence: Synthetic oligonucleotide
  Description of Combined DNA/RNA Molecule: Synthetic oligonucleotide
uauggatgatgtggtattggguuuuagagcuagaaauagcaaguuaaaauaaggcuaguccguuaucaacuugaaaaaguggcaccgagucggugcuuuu

SEQ ID NO: 873 - DNA, 20 bp, Artificial Sequence
  Description of Artificial Sequence: Synthetic oligonucleotide
aaaaaatcaaagaatgtttt

SEQ ID NO: 874 - DNA, 20 bp, Artificial Sequence
  Description of Artificial Sequence: Synthetic oligonucleotide
aaaaaatgtgaacagtttgt

SEQ ID NO: 875 - DNA, 20 bp, Artificial Sequence
  Description of Artificial Sequence: Synthetic oligonucleotide
aaaaatcaaagaatgtttta

SEQ ID NO: 876 - DNA, 20 bp, Artificial Sequence
  Description of Artificial Sequence: Synthetic oligonucleotide
aaaaatgtgaacagtttgta

SEQ ID NO: 877 - DNA, 21 bp, Artificial Sequence
  Description of Artificial Sequence: Synthetic oligonucleotide
aaaacattctttgattttttg

SEQ ID NO: 878 - DNA, 20 bp, Artificial Sequence
  Description of Artificial Sequence: Synthetic oligonucleotide
aaaaccccgcctgtaacacg

SEQ ID NO: 879 - DNA, 20 bp, Artificial Sequence
  Description of Artificial Sequence: Synthetic oligonucleotide
aaaagatggtgttttccaat

SEQ ID NO: 880 - DNA, 20 bp, Artificial Sequence
  Description of Artificial Sequence: Synthetic oligonucleotide
aaaaggttccacgcacgcgc

SEQ ID NO: 881 - DNA, 20 bp, Artificial Sequence
  Description of Artificial Sequence: Synthetic oligonucleotide
aaaagtgagacaagaaatgt

SEQ ID NO: 882 - DNA, 20 bp, Artificial Sequence
  Description of Artificial Sequence: Synthetic oligonucleotide
aaaatcaaagaatgttttag

SEQ ID NO: 883 - DNA, 20 bp, Artificial Sequence
  Description of Artificial Sequence: Synthetic oligonucleotide
aaaattggtaacagcggtaa

SEQ ID NO: 884 - DNA, 20 bp, Artificial Sequence
  Description of Artificial Sequence: Synthetic oligonucleotide
aaacaaaggacgtcccgcgc

SEQ ID NO: 885 - DNA, 20 bp, Artificial Sequence
  Description of Artificial Sequence: Synthetic oligonucleotide
aaacacagcaaatccagatt

SEQ ID NO: 886 - DNA, 20 bp, Artificial Sequence
  Description of Artificial Sequence: Synthetic oligonucleotide
aaacactcatcctcaggcca

SEQ ID NO: 887 - DNA, 20 bp, Artificial Sequence
  Description of Artificial Sequence: Synthetic oligonucleotide
aaacccagcccgaatgctcc

SEQ ID NO: 888 - DNA, 20 bp, Artificial Sequence
  Description of Artificial Sequence: Synthetic oligonucleotide
aaaccccgcctgtaacacga

SEQ ID NO: 889 - DNA, 20 bp, Artificial Sequence
  Description of Artificial Sequence: Synthetic oligonucleotide
aaacgagagtaactccacag

SEQ ID NO: 890 - DNA, 20 bp, Artificial Sequence
  Description of Artificial Sequence: Synthetic oligonucleotide
aaacgggcaacataccttga

SEQ ID NO: 891 - DNA, 20 bp, Artificial Sequence
  Description of Artificial Sequence: Synthetic oligonucleotide
aaactactgttgttagacga

SEQ ID NO: 892 - DNA, 20 bp, Artificial Sequence
  Description of Artificial Sequence: Synthetic oligonucleotide
aaactgagccaggagaaacg

SEQ ID NO: 893 - DNA, 20 bp, Artificial Sequence
  Description of Artificial Sequence: Synthetic oligonucleotide
aaactgttcacattttttga

SEQ ID NO: 894 - DNA, 21 bp, Artificial Sequence
  Description of Artificial Sequence: Synthetic oligonucleotide
aaacttcctattaacaggcct

SEQ ID NO: 895 - DNA, 20 bp, Artificial Sequence
  Description of Artificial Sequence: Synthetic oligonucleotide
aaagaatcccagaggattgc

SEQ ID NO: 896 - DNA, 20 bp, Artificial Sequence
  Description of Artificial Sequence: Synthetic oligonucleotide
aaagactgggaggagttggg

SEQ ID NO: 897 - DNA, 20 bp, Artificial Sequence
  Description of Artificial Sequence: Synthetic oligonucleotide
aaagagatggggttactctc

SEQ ID NO: 898 - DNA, 20 bp, Artificial Sequence
  Description of Artificial Sequence: Synthetic oligonucleotide
aaagatggtgttttccaatg

SEQ ID NO: 899 - DNA, 20 bp, Artificial Sequence
  Description of Artificial Sequence: Synthetic oligonucleotide
aaagattctgccccatgctg

SEQ ID NO: 900 - DNA, 20 bp, Artificial Sequence
  Description of Artificial Sequence: Synthetic oligonucleotide
aaaggtggagacagcggggt

SEQ ID NO: 901 - DNA, 20 bp, Artificial Sequence
  Description of Artificial Sequence: Synthetic oligonucleotide
aaagtatgtcaacgaattgt

SEQ ID NO: 902 - DNA, 20 bp, Artificial Sequence
  Description of Artificial Sequence: Synthetic oligonucleotide
aaagtgagacaagaaatgtg

SEQ ID NO: 903 - DNA, 20 bp, Artificial Sequence
  Description of Artificial Sequence: Synthetic oligonucleotide
aaagttgcatggtgctggtg

SEQ ID NO: 904 - DNA, 20 bp, Artificial Sequence
  Description of Artificial Sequence: Synthetic oligonucleotide
aaagtttgtagtatgccctg

SEQ ID NO: 905 - DNA, 20 bp, Artificial Sequence
  Description of Artificial Sequence: Synthetic oligonucleotide
aaatacaggcctctcactct

SEQ ID NO: 906 - DNA, 20 bp, Artificial Sequence
  Description of Artificial Sequence: Synthetic oligonucleotide
aaatatttaccattggataa

SEQ ID NO: 907 - DNA, 20 bp, Artificial Sequence
  Description of Artificial Sequence: Synthetic oligonucleotide
aaatcaaagaatgttttaga

SEQ ID NO: 908 - DNA, 20 bp, Artificial Sequence
  Description of Artificial Sequence: Synthetic oligonucleotide
aaatggggcagcaaaaccca

SEQ ID NO: 909 - DNA, 20 bp, Artificial Sequence
  Description of Artificial Sequence: Synthetic oligonucleotide
aaatgtatacccaaagacaa

SEQ ID NO: 910 - DNA, 20 bp, Artificial Sequence
  Description of Artificial Sequence: Synthetic oligonucleotide
aaatgtatattaggaaaaga

SEQ ID NO: 911 - DNA, 20 bp, Artificial Sequence
  Description of Artificial Sequence: Synthetic oligonucleotide
aaatgtgaaaccacaagagt

SEQ ID NO: 912 - DNA, 20 bp, Artificial Sequence
  Description of Artificial Sequence: Synthetic oligonucleotide
aaattaacacccacccaggt

SEQ ID NO: 913 - DNA, 20 bp, Artificial Sequence
  Description of Artificial Sequence: Synthetic oligonucleotide
aaattggtaacagcggtaaa

SEQ ID NO: 914 - DNA, 20 bp, Artificial Sequence
  Description of Artificial Sequence: Synthetic oligonucleotide
aacaaacagtctttgaagta

SEQ ID NO: 915 - DNA, 20 bp, Artificial Sequence
  Description of Artificial Sequence: Synthetic oligonucleotide
aacaaaggacgtcccgcgca

SEQ ID NO: 916 - DNA, 20 bp, Artificial Sequence
  Description of Artificial Sequence: Synthetic oligonucleotide
aacaagaagatgaggcatag

SEQ ID NO: 917 - DNA, 20 bp, Artificial Sequence
  Description of Artificial Sequence: Synthetic oligonucleotide
aacaagagatgattaggcag

SEQ ID NO: 918 - DNA, 20 bp, Artificial Sequence
  Description of Artificial Sequence: Synthetic oligonucleotide
aacaaggacacctggccaga

SEQ ID NO: 919 - DNA, 20 bp, Artificial Sequence
  Description of Artificial Sequence: Synthetic oligonucleotide
aacaatgctcaggagactct

SEQ ID NO: 920 - DNA, 20 bp, Artificial Sequence
  Description of Artificial Sequence: Synthetic oligonucleotide
aacacagcaaatccagattg

SEQ ID NO: 921 - DNA, 20 bp, Artificial Sequence
  Description of Artificial Sequence: Synthetic oligonucleotide
aacacatcatacaaaaaatc

SEQ ID NO: 922 - DNA, 21 bp, Artificial Sequence
  Description of Artificial Sequence: Synthetic oligonucleotide
aacacatcatacaaaaaatca

SEQ ID NO: 923 - DNA, 20 bp, Artificial Sequence
  Description of Artificial Sequence: Synthetic oligonucleotide
aacacccacccaggtagcta

SEQ ID NO: 924 - DNA, 20 bp, Artificial Sequence
  Description of Artificial Sequence: Synthetic oligonucleotide
aacacgagaaggggtcctag

SEQ ID NO: 925 - DNA, 20 bp, Artificial Sequence
  Description of Artificial Sequence: Synthetic oligonucleotide
aacagagttatcagtcccga

SEQ ID NO: 926 - DNA, 20 bp, Artificial Sequence
  Description of Artificial Sequence: Synthetic oligonucleotide
aacagcggtaaaaagggact

SEQ ID NO: 927 - DNA, 20 bp, Artificial Sequence
  Description of Artificial Sequence: Synthetic oligonucleotide
aacagtaggacatgaacaag

SEQ ID NO: 928 - DNA, 21 bp, Artificial Sequence
  Description of Artificial Sequence: Synthetic oligonucleotide
aacagtaggacatgaacaaga

SEQ ID NO: 929 - DNA, 21 bp, Artificial Sequence
  Description of Artificial Sequence: Synthetic oligonucleotide
aacagtctttgaagtatgcct

SEQ ID NO: 930 - DNA, 20 bp, Artificial Sequence
  Description of Artificial Sequence: Synthetic oligonucleotide
aacataccttgatagtccag

SEQ ID NO: 931 - DNA, 20 bp, Artificial Sequence
  Description of Artificial Sequence: Synthetic oligonucleotide
aacattgaggttcccgagat

SEQ ID NO: 932 - DNA, 20 bp, Artificial Sequence
  Description of Artificial Sequence: Synthetic oligonucleotide
aacccataaaattcagagag

SEQ ID NO: 933 - DNA, 21 bp, Artificial Sequence
  Description of Artificial Sequence: Synthetic oligonucleotide
aaccccgcctgtaacacgaga

SEQ ID NO: 934 - DNA, 21 bp, Artificial Sequence
  Description of Artificial Sequence: Synthetic oligonucleotide
aaccctaacaaaacaaagaga

SEQ ID NO: 935 - DNA, 21 bp, Artificial Sequence
  Description of Artificial Sequence: Synthetic oligonucleotide
aacctagcaggcataatcaat

SEQ ID NO: 936 - DNA, 20 bp, Artificial Sequence
  Description of Artificial Sequence: Synthetic oligonucleotide
aacctgcatgactactgctc

SEQ ID NO: 937 - DNA, 20 bp, Artificial Sequence
  Description of Artificial Sequence: Synthetic oligonucleotide
aacctttcaccaaactctgc

SEQ ID NO: 938 - DNA, 20 bp, Artificial Sequence
  Description of Artificial Sequence: Synthetic oligonucleotide
aacctttggataaaacctag

SEQ ID NO: 939 - DNA, 20 bp, Artificial Sequence
  Description of Artificial Sequence: Synthetic oligonucleotide
aaccttttcggctcctctgc

SEQ ID NO: 940 - DNA, 20 bp, Artificial Sequence
  Description of Artificial Sequence: Synthetic oligonucleotide
aacgagagtaactccacagt

SEQ ID NO: 941 - DNA, 21 bp, Artificial Sequence
  Description of Artificial Sequence: Synthetic oligonucleotide
aacgcaggataaccacattgt

SEQ ID NO: 942 - DNA, 20 bp, Artificial Sequence
  Description of Artificial Sequence: Synthetic oligonucleotide
aacgcccaccgaatgttgcc

SEQ ID NO: 943 - DNA, 20 bp, Artificial Sequence
  Description of Artificial Sequence: Synthetic oligonucleotide
aacggtttctcttccaaaag

SEQ ID NO: 944 - DNA, 20 bp, Artificial Sequence
  Description of Artificial Sequence: Synthetic oligonucleotide
aactaatgactctagctacc

SEQ ID NO: 945 - DNA, 20 bp, Artificial Sequence
  Description of Artificial Sequence: Synthetic oligonucleotide
aactaccgtgtgtcttggcc

SEQ ID NO: 946 - DNA, 20 bp, Artificial Sequence
  Description of Artificial Sequence: Synthetic oligonucleotide
aactactgttgttagacgac

SEQ ID NO: 947 - DNA, 20 bp, Artificial Sequence
  Description of Artificial Sequence: Synthetic oligonucleotide
aactagatgttctggataat

SEQ ID NO: 948 - DNA, 20 bp, Artificial Sequence
  Description of Artificial Sequence: Synthetic oligonucleotide
aactccctcgcctcgcagac

SEQ ID NO: 949 - DNA, 20 bp, Artificial Sequence
  Description of Artificial Sequence: Synthetic oligonucleotide
aactcctcccagtctttaaa

SEQ ID NO: 950 - DNA, 20 bp, Artificial Sequence
  Description of Artificial Sequence: Synthetic oligonucleotide
aactctgttgtcctctcccg

SEQ ID NO: 951 - DNA, 20 bp, Artificial Sequence
  Description of Artificial Sequence: Synthetic oligonucleotide
aactgaaagccaaacagtgg

SEQ ID NO: 952 - DNA, 20 bp, Artificial Sequence
  Description of Artificial Sequence: Synthetic oligonucleotide
aactggagccaccagcaggg

SEQ ID NO: 953 - DNA, 21 bp, Artificial Sequence
  Description of Artificial Sequence: Synthetic oligonucleotide
aacttccaatgacataaccca

SEQ ID NO: 954 - DNA, 20 bp, Artificial Sequence
  Description of Artificial Sequence: Synthetic oligonucleotide
aacttgtcctggttatcgct

SEQ ID NO: 955 - DNA, 20 bp, Artificial Sequence
  Description of Artificial Sequence: Synthetic oligonucleotide
aagaaaattggtaacagcgg

SEQ ID NO: 956 - DNA, 20 bp, Artificial Sequence
  Description of Artificial Sequence: Synthetic oligonucleotide
aagaaccaacaagaagatga

SEQ ID NO: 957 - DNA, 20 bp, Artificial Sequence
  Description of Artificial Sequence: Synthetic oligonucleotide
aagaagattgcaattgatta

SEQ ID NO: 958 - DNA, 20 bp, Artificial Sequence
  Description of Artificial Sequence: Synthetic oligonucleotide
aagaattgcttgcctgagtg

SEQ ID NO: 959 - DNA, 20 bp, Artificial Sequence
  Description of Artificial Sequence: Synthetic oligonucleotide
aagacattatcaaaaaatgt

SEQ ID NO: 960 - DNA, 21 bp, Artificial Sequence
  Description of Artificial Sequence: Synthetic oligonucleotide
aagacattatcaaaaaatgtg

SEQ ID NO: 961 - DNA, 20 bp, Artificial Sequence
  Description of Artificial Sequence: Synthetic oligonucleotide
aagactgggaggagttgggg

SEQ ID NO: 962 - DNA, 20 bp, Artificial Sequence
  Description of Artificial Sequence: Synthetic oligonucleotide
aagactgtttgtttaaagac

SEQ ID NO: 963 - DNA, 21 bp, Artificial Sequence
  Description of Artificial Sequence: Synthetic oligonucleotide
aagagaaaccgttatagagta

SEQ ID NO: 964 - DNA, 20 bp, Artificial Sequence
  Description of Artificial Sequence: Synthetic oligonucleotide
aagagagaaacaacacatag

SEQ ID NO: 965 - DNA, 20 bp, Artificial Sequence
  Description of Artificial Sequence: Synthetic oligonucleotide
aagagatgattaggcagagg

SEQ ID NO: 966 - DNA, 20 bp, Artificial Sequence
  Description of Artificial Sequence: Synthetic oligonucleotide
aagagatggggttactctct

SEQ ID NO: 967 - DNA, 20 bp, Artificial Sequence
  Description of Artificial Sequence: Synthetic oligonucleotide
aagaggactcttggactctc

SEQ ID NO: 968 - DNA, 20 bp, Artificial Sequence
  Description of Artificial Sequence: Synthetic oligonucleotide
aagatctacagcatggggca

SEQ ID NO: 969 - DNA, 20 bp, Artificial Sequence
  Description of Artificial Sequence: Synthetic oligonucleotide
aagatctcgtactgaaggaa

SEQ ID NO: 970 - DNA, 20 bp, Artificial Sequence
  Description of Artificial Sequence: Synthetic oligonucleotide
aagatggtgttttccaatga

SEQ ID NO: 971 - DNA, 20 bp, Artificial Sequence
  Description of Artificial Sequence: Synthetic oligonucleotide
aagattctgccccatgctgt

SEQ ID NO: 972 - DNA, 20 bp, Artificial Sequence
  Description of Artificial Sequence: Synthetic oligonucleotide
aagattgacgataagggaga

SEQ ID NO: 973 - DNA, 20 bp, Artificial Sequence
  Description of Artificial Sequence: Synthetic oligonucleotide
aagcaattctttgctggggg

SEQ ID NO: 974 - DNA, 20 bp, Artificial Sequence
  Description of Artificial Sequence: Synthetic oligonucleotide
aagcgaagtgcacacggtcc

SEQ ID NO: 975 - DNA, 21 bp, Artificial Sequence
  Description of Artificial Sequence: Synthetic oligonucleotide
aagcgaagtgcacacggtccg

SEQ ID NO: 976 - DNA, 20 bp, Artificial Sequence
  Description of Artificial Sequence: Synthetic oligonucleotide
aaggacacctggccagacgc

SEQ ID NO: 977 - DNA, 20 bp, Artificial Sequence
  Description of Artificial Sequence: Synthetic oligonucleotide
aaggcctccgtgcggtgggg

SEQ ID NO: 978 - DNA, 20 bp, Artificial Sequence
  Description of Artificial Sequence: Synthetic oligonucleotide
aaggcgggtatattatataa

SEQ ID NO: 979 - DNA, 20 bp, Artificial Sequence
  Description of Artificial Sequence: Synthetic oligonucleotide
aaggcttcccgatacagagc

SEQ ID NO: 980 - DNA, 20 bp, Artificial Sequence
  Description of Artificial Sequence: Synthetic oligonucleotide
aagggactcaagatgctgta

SEQ ID NO: 981 - DNA, 21 bp, Artificial Sequence
  Description of Artificial Sequence: Synthetic oligonucleotide
aaggggtcctaggaatcctga

SEQ ID NO: 982 - DNA, 20 bp, Artificial Sequence
  Description of Artificial Sequence: Synthetic oligonucleotide
aagggtcgatgtccatgccc

SEQ ID NO: 983 - DNA, 20 bp, Artificial Sequence
  Description of Artificial Sequence: Synthetic oligonucleotide
aagggtcgtccgcaggattc

SEQ ID NO: 984 - DNA, 20 bp, Artificial Sequence
  Description of Artificial Sequence: Synthetic oligonucleotide
aaggtaggagctggagcatt

SEQ ID NO: 985 - DNA, 20 bp, Artificial Sequence
  Description of Artificial Sequence: Synthetic oligonucleotide
aaggtcggtcgttgacattg

SEQ ID NO: 986 - DNA, 20 bp, Artificial Sequence
  Description of Artificial Sequence: Synthetic oligonucleotide
aaggtggagacagcggggta

SEQ ID NO: 987 - DNA, 21 bp, Artificial Sequence
  Description of Artificial Sequence: Synthetic oligonucleotide
aaggttaccaaatatttacca

SEQ ID NO: 988 - DNA, 20 bp, Artificial Sequence
  Description of Artificial Sequence: Synthetic oligonucleotide
aaggtttggtacagcaacag

SEQ ID NO: 989 - DNA, 21 bp, Artificial Sequence
  Description of Artificial Sequence: Synthetic oligonucleotide
aaggtttggtacagcaacagg

SEQ ID NO: 990 - DNA, 20 bp, Artificial Sequence
  Description of Artificial Sequence: Synthetic oligonucleotide
aagtgaaagcctgcttagat

SEQ ID NO: 991 - DNA, 20 bp, Artificial Sequence
  Description of Artificial Sequence: Synthetic oligonucleotide
aagttatgggtccttgccac

SEQ ID NO: 992 - DNA, 21 bp, Artificial Sequence
  Description of Artificial Sequence: Synthetic oligonucleotide
aagttggaggacaggaggttg

SEQ ID NO: 993 - DNA, 20 bp, Artificial Sequence
  Description of Artificial Sequence: Synthetic oligonucleotide
aagttttctaaaacattctt

SEQ ID NO: 994 - DNA, 20 bp, Artificial Sequence
  Description of Artificial Sequence: Synthetic oligonucleotide
aatacaggcctctcactctg

SEQ ID NO: 995 - DNA, 20 bp, Artificial Sequence
  Description of Artificial Sequence: Synthetic oligonucleotide
aatactaacattgaggttcc

SEQ ID NO: 996 - DNA, 20 bp, Artificial Sequence
  Description of Artificial Sequence: Synthetic oligonucleotide
aatagtgtctagtttggaag

SEQ ID NO: 997 - DNA, 21 bp, Artificial Sequence
  Description of Artificial Sequence: Synthetic oligonucleotide
aatagtgtctagtttggaagt

SEQ ID NO: 998 - DNA, 20 bp, Artificial Sequence
  Description of Artificial Sequence: Synthetic oligonucleotide
aatatggtgacccacaaaat

SEQ ID NO: 999 - DNA, 20 bp, Artificial Sequence
  Description of Artificial Sequence: Synthetic oligonucleotide
aatatttggtaacctttgga

SEQ ID NO: 1000 - DNA, 20 bp, Artificial Sequence
  Description of Artificial Sequence: Synthetic oligonucleotide
aatcaataggcctgttaata

SEQ ID NO: 1001 - DNA, 20 bp, Artificial Sequence
  Description of Artificial Sequence: Synthetic oligonucleotide
aatcccagaggattgctggt

SEQ ID NO: 1002 - DNA, 20 bp, Artificial Sequence
  Description of Artificial Sequence: Synthetic oligonucleotide
aatccgcctcctgcctccac

SEQ ID NO: 1003 - DNA, 20 bp, Artificial Sequence
  Description of Artificial Sequence: Synthetic oligonucleotide
aatcctctgggattctttcc

SEQ ID NO: 1004 - DNA, 21 bp, Artificial Sequence
  Description of Artificial Sequence: Synthetic oligonucleotide
aatcctgcggacgacccttct

SEQ ID NO: 1005 - DNA, 20 bp, Artificial Sequence
  Description of Artificial Sequence: Synthetic oligonucleotide
aatctcgggaacctcaatgt

SEQ ID NO: 1006 - DNA, 21 bp, Artificial Sequence
  Description of Artificial Sequence: Synthetic oligonucleotide
aatcttcttttctcattaact

SEQ ID NO: 1007 - DNA, 20 bp, Artificial Sequence
  Description of Artificial Sequence: Synthetic oligonucleotide
aatgactctagctacctggg

SEQ ID NO: 1008 - DNA, 20 bp, Artificial Sequence
  Description of Artificial Sequence: Synthetic oligonucleotide
aatgattaactagatgttct

SEQ ID NO: 1009 - DNA, 21 bp, Artificial Sequence
  Description of Artificial Sequence: Synthetic oligonucleotide
aatgattaactagatgttctg

SEQ ID NO: 1010 - DNA, 20 bp, Artificial Sequence
  Description of Artificial Sequence: Synthetic oligonucleotide
aatggcactagtaaactgag

SEQ ID NO: 1011 - DNA, 20 bp, Artificial Sequence
  Description of Artificial Sequence: Synthetic oligonucleotide
aatggggcagcaaaacccaa

SEQ ID NO: 1012 - DNA, 20 bp, Artificial Sequence
  Description of Artificial Sequence: Synthetic oligonucleotide
aatgtatacccaaagacaaa

SEQ ID NO: 1013 - DNA, 20 bp, Artificial Sequence
  Description of Artificial Sequence: Synthetic oligonucleotide
aatgtttgctccagacctgc

SEQ ID NO: 1014 - DNA, 21 bp, Artificial Sequence
  Description of Artificial Sequence: Synthetic oligonucleotide
aattcgttgacatactttcca

SEQ ID NO: 1015 - DNA, 20 bp, Artificial Sequence
  Description of Artificial Sequence: Synthetic oligonucleotide
aattctttgctggggggaac

SEQ ID NO: 1016 - DNA, 20 bp, Artificial Sequence
  Description of Artificial Sequence: Synthetic oligonucleotide
aattggtaacagcggtaaaa

SEQ ID NO: 1017 - DNA, 20 bp, Artificial Sequence
  Description of Artificial Sequence: Synthetic oligonucleotide
aatttatgcctacagcctcc

SEQ ID NO: 1018 - DNA, 20 bp, Artificial Sequence
  Description of Artificial Sequence: Synthetic oligonucleotide
aatttggaagatccagcatc

SEQ ID NO: 1019 - DNA, 20 bp, Artificial Sequence
  Description of Artificial Sequence: Synthetic oligonucleotide
aattttatgggttatgtcat

SEQ ID NO: 1020 - DNA, 21 bp, Artificial Sequence
  Description of Artificial Sequence: Synthetic oligonucleotide
aattttatgggttatgtcatt

SEQ ID NO: 1021 - DNA, 20 bp, Artificial Sequence
  Description of Artificial Sequence: Synthetic oligonucleotide
aattttccgaaagcccagga

SEQ ID NO: 1022 - DNA, 20 bp, Artificial Sequence
  Description of Artificial Sequence: Synthetic oligonucleotide
acaaactttgccagcaaatc

SEQ ID NO: 1023 - DNA, 21 bp, Artificial Sequence
  Description of Artificial Sequence: Synthetic oligonucleotide
acaaagagatggggttactct

SEQ ID NO: 1024 - DNA, 21 bp, Artificial Sequence
  Description of Artificial Sequence: Synthetic oligonucleotide
acaacagtagtttccggaagt

SEQ ID NO: 1025 - DNA, 21 bp, Artificial Sequence
  Description of Artificial Sequence: Synthetic oligonucleotide
acaacctttcaccaaactctg

SEQ ID NO: 1026 - DNA, 20 bp, Artificial Sequence
  Description of Artificial Sequence: Synthetic oligonucleotide
acaagaaatgtgaaaccaca

SEQ ID NO: 1027 - DNA, 20 bp, Artificial Sequence
  Description of Artificial Sequence: Synthetic oligonucleotide
acaagaacacatcatacaaa

SEQ ID NO: 1028 - DNA, 20 bp, Artificial Sequence
  Description of Artificial Sequence: Synthetic oligonucleotide
acaagaagatgaggcatagc

SEQ ID NO: 1029 - DNA, 20 bp, Artificial Sequence
  Description of Artificial Sequence: Synthetic oligonucleotide
acaagagttgcctgaacttt

SEQ ID NO: 1030 - DNA, 20 bp, Artificial Sequence
  Description of Artificial Sequence: Synthetic oligonucleotide
acaaggcctttctgtgtaaa

SEQ ID NO: 1031 - DNA, 20 bp, Artificial Sequence
  Description of Artificial Sequence: Synthetic oligonucleotide
acaagggcattaacgcagga

SEQ ID NO: 1032 - DNA, 20 bp, Artificial Sequence
  Description of Artificial Sequence: Synthetic oligonucleotide
acaatgctcaggagactcta

SEQ ID NO: 1033 - DNA, 20 bp, Artificial Sequence
  Description of Artificial Sequence: Synthetic oligonucleotide
acaatgtggttatcctgcgt

SEQ ID NO: 1034 - DNA, 20 bp, Artificial Sequence
  Description of Artificial Sequence: Synthetic oligonucleotide
acacacggtagttcccccta

SEQ ID NO: 1035 - DNA, 20 bp, Artificial Sequence
  Description of Artificial Sequence: Synthetic oligonucleotide
acacatagcgcctcattttg

SEQ ID NO: 1036 - DNA, 20 bp, Artificial Sequence
  Description of Artificial Sequence: Synthetic oligonucleotide
acacatcatacaaaaaatca

SEQ ID NO: 1037 - DNA, 20 bp, Artificial Sequence
  Description of Artificial Sequence: Synthetic oligonucleotide
acacctggccagacgccaac

SEQ ID NO: 1038 - DNA, 20 bp, Artificial Sequence
  Description of Artificial Sequence: Synthetic oligonucleotide
acacggtagttccccctaga

SEQ ID NO: 1039 - DNA, 20 bp, Artificial Sequence
  Description of Artificial Sequence: Synthetic oligonucleotide
acacggtccggcagatgaga

SEQ ID NO: 1040 - DNA, 20 bp, Artificial Sequence
  Description of Artificial Sequence: Synthetic oligonucleotide
acactatttacacactctat

SEQ ID NO: 1041 - DNA, 20 bp, Artificial Sequence
  Description of Artificial Sequence: Synthetic oligonucleotide
acactcatcctcaggccatg

SEQ ID NO: 1042 - DNA, 20 bp, Artificial Sequence
  Description of Artificial Sequence: Synthetic oligonucleotide
acagaaaggccttgtaagtt

SEQ ID NO: 1043 - DNA, 20 bp, Artificial Sequence
  Description of Artificial Sequence: Synthetic oligonucleotide
acagacggggagtccgcgta

SEQ ID NO: 1044 - DNA, 20 bp, Artificial Sequence
  Description of Artificial Sequence: Synthetic oligonucleotide
acagagctgaggcggtatct

SEQ ID NO: 1045 - DNA, 21 bp, Artificial Sequence
  Description of Artificial Sequence: Synthetic oligonucleotide
acagagctgaggcggtatcta

SEQ ID NO: 1046 - DNA, 21 bp, Artificial Sequence
  Description of Artificial Sequence: Synthetic oligonucleotide
acagcaaatccagattgggac

SEQ ID NO: 1047 - DNA, 20 bp, Artificial Sequence
  Description of Artificial Sequence: Synthetic oligonucleotide
acagcaacaggagggataca

SEQ ID NO: 1048 - DNA, 21 bp, Artificial Sequence
  Description of Artificial Sequence: Synthetic oligonucleotide
acagcaacaggagggatacat

SEQ ID NO: 1049 - DNA, 20 bp, Artificial Sequence
  Description of Artificial Sequence: Synthetic oligonucleotide
acagcggtaaaaagggactc

SEQ ID NO: 1050 - DNA, 20 bp, Artificial Sequence
  Description of Artificial Sequence: Synthetic oligonucleotide
acagcttggaggcttgaaca

SEQ ID NO: 1051 - DNA, 20 bp, Artificial Sequence
  Description of Artificial Sequence: Synthetic oligonucleotide
acaggtacagtagaagaata

SEQ ID NO: 1052 - DNA, 20 bp, Artificial Sequence
  Description of Artificial Sequence: Synthetic oligonucleotide
acaggtgcaatttccgtccg

SEQ ID NO: 1053 - DNA, 20 bp, Artificial Sequence
  Description of Artificial Sequence: Synthetic oligonucleotide
acagtagtttccggaagtgt

SEQ ID NO: 1054 - DNA, 20 bp, Artificial Sequence
  Description of Artificial Sequence: Synthetic oligonucleotide
acagtctttgaagtatgcct

SEQ ID NO: 1055 - DNA, 20 bp, Artificial Sequence
  Description of Artificial Sequence: Synthetic oligonucleotide
acagtttgtaggcccactta

SEQ ID NO: 1056 - DNA, 20 bp, Artificial Sequence
  Description of Artificial Sequence: Synthetic oligonucleotide
acataacccataaaattcag

SEQ ID NO: 1057 - DNA, 21 bp, Artificial Sequence
  Description of Artificial Sequence: Synthetic oligonucleotide
acataactgactactaggtct

SEQ ID NO: 1058 - DNA, 20 bp, Artificial Sequence
  Description of Artificial Sequence: Synthetic oligonucleotide
acataccttgatagtccaga

SEQ ID NO: 1059 - DNA, 20 bp, Artificial Sequence
  Description of Artificial Sequence: Synthetic oligonucleotide
acatcacatcaggattccta

SEQ ID NO: 1060 - DNA, 20 bp, Artificial Sequence
  Description of Artificial Sequence: Synthetic oligonucleotide
acatcatacaaaaaatcaaa

SEQ ID NO: 1061 - DNA, 20 bp, Artificial Sequence
  Description of Artificial Sequence: Synthetic oligonucleotide
acatcgtatccatggctgct

SEQ ID NO: 1062 - DNA, 20 bp, Artificial Sequence
  Description of Artificial Sequence: Synthetic oligonucleotide
acatgaacaagagatgatta

SEQ ID NO: 1063 - DNA, 20 bp, Artificial Sequence
  Description of Artificial Sequence: Synthetic oligonucleotide
acattatcaaaaaatgtgaa

SEQ ID NO: 1064 - DNA, 20 bp, Artificial Sequence
  Description of Artificial Sequence: Synthetic oligonucleotide
acattctttgattttttgta

SEQ ID NO: 1065 - DNA, 20 bp, Artificial Sequence
  Description of Artificial Sequence: Synthetic oligonucleotide
acattgaggttcccgagatt

SEQ ID NO: 1066 - DNA, 20 bp, Artificial Sequence
  Description of Artificial Sequence: Synthetic oligonucleotide
acattgtgtaaatggggcag

SEQ ID NO: 1067 - DNA, 20 bp, Artificial Sequence
  Description of Artificial Sequence: Synthetic oligonucleotide
acatttcttgtctcactttt

SEQ ID NO: 1068 - DNA, 20 bp, Artificial Sequence
  Description of Artificial Sequence: Synthetic oligonucleotide
accaaactctgcaagatccc

SEQ ID NO: 1069 - DNA, 20 bp, Artificial Sequence
  Description of Artificial Sequence: Synthetic oligonucleotide
accaaatatttaccattgga

SEQ ID NO: 1070 - DNA, 21 bp, Artificial Sequence
  Description of Artificial Sequence: Synthetic oligonucleotide
accaaatatttaccattggat

SEQ ID NO: 1071 - DNA, 20 bp, Artificial Sequence
  Description of Artificial Sequence: Synthetic oligonucleotide
accaaatgcccctatcctat

SEQ ID NO: 1072 - DNA, 20 bp, Artificial Sequence
  Description of Artificial Sequence: Synthetic oligonucleotide
accaacaagaagatgaggca

SEQ ID NO: 1073 - DNA, 20 bp, Artificial Sequence
  Description of Artificial Sequence: Synthetic oligonucleotide
accaattttcttttgtcttt

SEQ ID NO: 1074 - DNA, 20 bp, Artificial Sequence
  Description of Artificial Sequence: Synthetic oligonucleotide
accacatcatccatataact

SEQ ID NO: 1075 - DNA, 20 bp, Artificial Sequence
  Description of Artificial Sequence: Synthetic oligonucleotide
accacattgtgtaaatgggg

SEQ ID NO: 1076 - DNA, 21 bp, Artificial Sequence
  Description of Artificial Sequence: Synthetic oligonucleotide
accagtaaagttccccacctt

SEQ ID NO: 1077 - DNA, 20 bp, Artificial Sequence
  Description of Artificial Sequence: Synthetic oligonucleotide
accagttggatccagccttc

SEQ ID NO: 1078 - DNA, 20 bp, Artificial Sequence
  Description of Artificial Sequence: Synthetic oligonucleotide
acccataacttccaatgaca

SEQ ID NO: 1079 - DNA, 20 bp, Artificial Sequence
  Description of Artificial Sequence: Synthetic oligonucleotide
accccgagaagggtcgtccg

SEQ ID NO: 1080 - DNA, 20 bp, Artificial Sequence
  Description of Artificial Sequence: Synthetic oligonucleotide
accccgcctgtaacacgaga

SEQ ID NO: 1081 - DNA, 20 bp, Artificial Sequence
  Description of Artificial Sequence: Synthetic oligonucleotide
accccgctgtctccaccttt

SEQ ID NO: 1082 - DNA, 20 bp, Artificial Sequence
  Description of Artificial Sequence: Synthetic oligonucleotide
accccttctcgtgttacagg

SEQ ID NO: 1083 - DNA, 20 bp, Artificial Sequence
  Description of Artificial Sequence: Synthetic oligonucleotide
accctaacaaaacaaagaga

SEQ ID NO: 1084 - DNA, 21 bp, Artificial Sequence
  Description of Artificial Sequence: Synthetic oligonucleotide
acccttatccaatggtaaata

SEQ ID NO: 1085 - DNA, 20 bp, Artificial Sequence
  Description of Artificial Sequence: Synthetic oligonucleotide
acccttctcggggtcgcttg

SEQ ID NO: 1086 - DNA, 20 bp, Artificial Sequence
  Description of Artificial Sequence: Synthetic oligonucleotide
accgaccttgaggcatactt

SEQ ID NO: 1087 - DNA, 20 bp, Artificial Sequence
  Description of Artificial Sequence: Synthetic oligonucleotide
accgcctcagctctgtatcg

SEQ ID NO: 1088 - DNA, 20 bp, Artificial Sequence
  Description of Artificial Sequence: Synthetic oligonucleotide
acctagcaggcataatcaat

SEQ ID NO: 1089 - DNA, 20 bp, Artificial Sequence
  Description of Artificial Sequence: Synthetic oligonucleotide
acctcaccatactgcactca

SEQ ID NO: 1090 - DNA, 21 bp, Artificial Sequence
  Description of Artificial Sequence: Synthetic oligonucleotide
acctcctgtcctccaacttgt

SEQ ID NO: 1091 - DNA, 20 bp, Artificial Sequence
  Description of Artificial Sequence: Synthetic oligonucleotide
acctgcatgactactgctca

SEQ ID NO: 1092 - DNA, 20 bp, Artificial Sequence
  Description of Artificial Sequence: Synthetic oligonucleotide
acctggccgttgccgggcaa

SEQ ID NO: 1093 - DNA, 20 bp, Artificial Sequence
  Description of Artificial Sequence: Synthetic oligonucleotide
acctgggtgggtgttaattt

SEQ ID NO: 1094 - DNA, 21 bp, Artificial Sequence
  Description of Artificial Sequence: Synthetic oligonucleotide
acctgggtgggtgttaatttg

SEQ ID NO: 1095 - DNA, 20 bp, Artificial Sequence
  Description of Artificial Sequence: Synthetic oligonucleotide
acctgtctttaatcctcatt

SEQ ID NO: 1096 - DNA, 20 bp, Artificial Sequence
  Description of Artificial Sequence: Synthetic oligonucleotide
accttattatccagaacatc

SEQ ID NO: 1097 - DNA, 20 bp, Artificial Sequence
  Description of Artificial Sequence: Synthetic oligonucleotide
accttcgtctgcgaggcgag

SEQ ID NO: 1098 - DNA, 20 bp, Artificial Sequence
  Description of Artificial Sequence: Synthetic oligonucleotide
accttgggcaacattcggtg

SEQ ID NO: 1099 - DNA, 20 bp, Artificial Sequence
  Description of Artificial Sequence: Synthetic oligonucleotide
acctttaccccgttgcccgg

SEQ ID NO: 1100 - DNA, 20 bp, Artificial Sequence
  Description of Artificial Sequence: Synthetic oligonucleotide
acctttcaccaaactctgca

SEQ ID NO: 1101 - DNA, 20 bp, Artificial Sequence
  Description of Artificial Sequence: Synthetic oligonucleotide
acctttggataaaacctagc

SEQ ID NO: 1102 - DNA, 21 bp, Artificial Sequence
  Description of Artificial Sequence: Synthetic oligonucleotide
acgagaaggggtcctaggaat

SEQ ID NO: 1103 - DNA, 20 bp, Artificial Sequence
  Description of Artificial Sequence: Synthetic oligonucleotide
acgaggcaggtcccctagaa

SEQ ID NO: 1104 - DNA, 20 bp, Artificial Sequence
  Description of Artificial Sequence: Synthetic oligonucleotide
acgatgtatatttgcgggag

SEQ ID NO: 1105 - DNA, 20 bp, Artificial Sequence
  Description of Artificial Sequence: Synthetic oligonucleotide
acgcacgcgctgatggccca

SEQ ID NO: 1106 - DNA, 20 bp, Artificial Sequence
  Description of Artificial Sequence: Synthetic oligonucleotide
acgcccaccgaatgttgccc

SEQ ID NO: 1107 - DNA, 20 bp, Artificial Sequence
  Description of Artificial Sequence: Synthetic oligonucleotide
acgcgctgatggcccatgac

SEQ ID NO: 1108 - DNA, 20 bp, Artificial Sequence
  Description of Artificial Sequence: Synthetic oligonucleotide
acggaggccttttggggtgg

SEQ ID NO: 1109 - DNA, 20 bp, Artificial Sequence
  Description of Artificial Sequence: Synthetic oligonucleotide
acggcagacggagaagggga

SEQ ID NO: 1110 - DNA, 20 bp, Artificial Sequence
  Description of Artificial Sequence: Synthetic oligonucleotide
acgggctgaggcccactccc

SEQ ID NO: 1111 - DNA, 20 bp, Artificial Sequence
  Description of Artificial Sequence: Synthetic oligonucleotide
acggggagtccgcgtaaaga

SEQ ID NO: 1112 - DNA, 20 bp, Artificial Sequence
  Description of Artificial Sequence: Synthetic oligonucleotide
acggtggtctccatgcgacg

SEQ ID NO: 1113 - DNA, 20 bp, Artificial Sequence
  Description of Artificial Sequence: Synthetic oligonucleotide
acggtttctcttccaaaagt

SEQ ID NO: 1114 - DNA, 20 bp, Artificial Sequence
  Description of Artificial Sequence: Synthetic oligonucleotide
acgtcgcatggagaccaccg

SEQ ID NO: 1115 - DNA, 20 bp, Artificial Sequence
  Description of Artificial Sequence: Synthetic oligonucleotide
actaatatgggcctaaagtt

SEQ ID NO: 1116 - DNA, 20 bp, Artificial Sequence
  Description of Artificial Sequence: Synthetic oligonucleotide
actaatgactctagctacct

SEQ ID NO: 1117 - DNA, 20 bp, Artificial Sequence
  Description of Artificial Sequence: Synthetic oligonucleotide
actaccgtgtgtcttggcca

SEQ ID NO: 1118 - DNA, 20 bp, Artificial Sequence
  Description of Artificial Sequence: Synthetic oligonucleotide
actactaggtctctagatgc

SEQ ID NO: 1119 - DNA, 20 bp, Artificial Sequence
  Description of Artificial Sequence: Synthetic oligonucleotide
actactgttgttagacgacg

SEQ ID NO: 1120 - DNA, 20 bp, Artificial Sequence
  Description of Artificial Sequence: Synthetic oligonucleotide
actagatgttctggataata

SEQ ID NO: 1121 - DNA, 21 bp, Artificial Sequence
  Description of Artificial Sequence: Synthetic oligonucleotide
actaggaggctgtaggcataa

SEQ ID NO: 1122 - DNA, 20 bp, Artificial Sequence
  Description of Artificial Sequence: Synthetic oligonucleotide
actagtaaactgagccagga

SEQ ID NO: 1123 - DNA, 20 bp, Artificial Sequence
  Description of Artificial Sequence: Synthetic oligonucleotide
actatttacacactctatgg

SEQ ID NO: 1124 - DNA, 21 bp, Artificial Sequence
  Description of Artificial Sequence: Synthetic oligonucleotide
actcataaggtggggaacttt

SEQ ID NO: 1125 - DNA, 21 bp, Artificial Sequence
  Description of Artificial Sequence: Synthetic oligonucleotide
actcctccagcttatagacca

SEQ ID NO: 1126 - DNA, 20 bp, Artificial Sequence
  Description of Artificial Sequence: Synthetic oligonucleotide
actctaaggcttcccgatac

SEQ ID NO: 1127 - DNA, 21 bp, Artificial Sequence
  Description of Artificial Sequence: Synthetic oligonucleotide
actctagctacctgggtgggt

SEQ ID NO: 1128 - DNA, 20 bp, Artificial Sequence
  Description of Artificial Sequence: Synthetic oligonucleotide
actctgttgtcctctcccgc

SEQ ID NO: 1129 - DNA, 20 bp, Artificial Sequence
  Description of Artificial Sequence: Synthetic oligonucleotide
actgaaagccaaacagtggg

SEQ ID NO: 1130 - DNA, 20 bp, Artificial Sequence
  Description of Artificial Sequence: Synthetic oligonucleotide
actgaaggaaagaagtcaga

SEQ ID NO: 1131 - DNA, 20 bp, Artificial Sequence
  Description of Artificial Sequence: Synthetic oligonucleotide
actggctggggcttggtcat

SEQ ID NO: 1132 - DNA, 20 bp, Artificial Sequence
  Description of Artificial Sequence: Synthetic oligonucleotide
actgggaggagttgggggag

SEQ ID NO: 1133 - DNA, 20 bp, Artificial Sequence
  Description of Artificial Sequence: Synthetic oligonucleotide
actgttgttagacgacgagg

SEQ ID NO: 1134 - DNA, 20 bp, Artificial Sequence
  Description of Artificial Sequence: Synthetic oligonucleotide
actgtttgtttaaagactgg

SEQ ID NO: 1135 - DNA, 21 bp, Artificial Sequence
  Description of Artificial Sequence: Synthetic oligonucleotide
actgtttgtttaaagactggg

SEQ ID NO: 1136 - DNA, 20 bp, Artificial Sequence
  Description of Artificial Sequence: Synthetic oligonucleotide
acttacaaggcctttctgtg

SEQ ID NO: 1137 - DNA, 20 bp, Artificial Sequence
  Description of Artificial Sequence: Synthetic oligonucleotide
acttacagttaatgagaaaa

SEQ ID NO: 1138 - DNA, 20 bp, Artificial Sequence
  Description of Artificial Sequence: Synthetic oligonucleotide
acttcaaagactgtttgttt

SEQ ID NO: 1139 - DNA, 20 bp, Artificial Sequence
  Description of Artificial Sequence: Synthetic oligonucleotide
acttccaatgacataaccca

SEQ ID NO: 1140 - DNA, 20 bp, Artificial Sequence
  Description of Artificial Sequence: Synthetic oligonucleotide
agaaaattggtaacagcggt

SEQ ID NO: 1141 - DNA, 20 bp, Artificial Sequence
  Description of Artificial Sequence: Synthetic oligonucleotide
agaaaccgttatagagtatt

SEQ ID NO: 1142 - DNA, 20 bp, Artificial Sequence
  Description of Artificial Sequence: Synthetic oligonucleotide
agaagaaccaacaagaagat

SEQ ID NO: 1143 - DNA, 20 bp, Artificial Sequence
  Description of Artificial Sequence: Synthetic oligonucleotide
agaagatctcgtactgaagg

SEQ ID NO: 1144 - DNA, 20 bp, Artificial Sequence
  Description of Artificial Sequence: Synthetic oligonucleotide
agaagattgacgataaggga

SEQ ID NO: 1145 - DNA, 20 bp, Artificial Sequence
  Description of Artificial Sequence: Synthetic oligonucleotide
agaaggggtcctaggaatcc

SEQ ID NO: 1146 - DNA, 20 bp, Artificial Sequence
  Description of Artificial Sequence: Synthetic oligonucleotide
agacaagaaatgtgaaacca

SEQ ID NO: 1147 - DNA, 21 bp, Artificial Sequence
  Description of Artificial Sequence: Synthetic oligonucleotide
agacaagaaatgtgaaaccac

SEQ ID NO: 1148 - DNA, 20 bp, Artificial Sequence
  Description of Artificial Sequence: Synthetic oligonucleotide
agacacacggtagttccccc

SEQ ID NO: 1149 - DNA, 20 bp, Artificial Sequence
  Description of Artificial Sequence: Synthetic oligonucleotide
agacaccaaatactctataa

SEQ ID NO: 1150 - DNA, 20 bp, Artificial Sequence
  Description of Artificial Sequence: Synthetic oligonucleotide
agacaggtacagtagaagaa

SEQ ID NO: 1151 - DNA, 20 bp, Artificial Sequence
  Description of Artificial Sequence: Synthetic oligonucleotide
agaccaccgtgaacgcccac

SEQ ID NO: 1152 - DNA, 20 bp, Artificial Sequence
  Description of Artificial Sequence: Synthetic oligonucleotide
agacctgctgcgagcaaaac

SEQ ID NO: 1153 - DNA, 20 bp, Artificial Sequence
  Description of Artificial Sequence: Synthetic oligonucleotide
agaccttcgtctgcgaggcg

SEQ ID NO: 1154 - DNA, 21 bp, Artificial Sequence
  Description of Artificial Sequence: Synthetic oligonucleotide
agaccttcgtctgcgaggcga

SEQ ID NO: 1155 - DNA, 20 bp, Artificial Sequence
  Description of Artificial Sequence: Synthetic oligonucleotide
agaccttgggcaacattcgg

SEQ ID NO: 1156 - DNA, 20 bp, Artificial Sequence
  Description of Artificial Sequence: Synthetic oligonucleotide
agacggggagtccgcgtaaa

SEQ ID NO: 1157 - DNA, 21 bp, Artificial Sequence
  Description of Artificial Sequence: Synthetic oligonucleotide
agacggggagtccgcgtaaag

SEQ ID NO: 1158 - DNA, 20 bp, Artificial Sequence
  Description of Artificial Sequence: Synthetic oligonucleotide
agactgggaggagttggggg

SEQ ID NO: 1159 - DNA, 21 bp, Artificial Sequence
  Description of Artificial Sequence: Synthetic oligonucleotide
agactgggaggagttggggga

SEQ ID NO: 1160 - DNA, 20 bp, Artificial Sequence
  Description of Artificial Sequence: Synthetic oligonucleotide
agactgtttgtttaaagact

SEQ ID NO: 1161 - DNA, 20 bp, Artificial Sequence
  Description of Artificial Sequence: Synthetic oligonucleotide
agagagtcccaagcgacccc

SEQ ID NO: 1162 - DNA, 20 bp, Artificial Sequence
  Description of Artificial Sequence: Synthetic oligonucleotide
agagatgattaggcagaggt

SEQ ID NO: 1163 - DNA, 20 bp, Artificial Sequence
  Description of Artificial Sequence: Synthetic oligonucleotide
agagcaaacacagcaaatcc

SEQ ID NO: 1164 - DNA, 20 bp, Artificial Sequence
  Description of Artificial Sequence: Synthetic oligonucleotide
agagctgaggcggtatctag

SEQ ID NO: 1165 - DNA, 20 bp, Artificial Sequence
  Description of Artificial Sequence: Synthetic oligonucleotide
agaggaagatgataaaacgc

SEQ ID NO: 1166 - DNA, 20 bp, Artificial Sequence
  Description of Artificial Sequence: Synthetic oligonucleotide
agaggcctgtatttccctgc

SEQ ID NO: 1167 - DNA, 20 bp, Artificial Sequence
  Description of Artificial Sequence: Synthetic oligonucleotide
agagtatttggtgtctttcg

SEQ ID NO: 1168 - DNA, 20 bp, Artificial Sequence
  Description of Artificial Sequence: Synthetic oligonucleotide
agagtcccaagcgaccccga

SEQ ID NO: 1169 - DNA, 21 bp, Artificial Sequence
  Description of Artificial Sequence: Synthetic oligonucleotide
agagtcccaagcgaccccgag

SEQ ID NO: 1170 - DNA, 20 bp, Artificial Sequence
  Description of Artificial Sequence: Synthetic oligonucleotide
agagtttggtgaaaggttgt

SEQ ID NO: 1171 - DNA, 20 bp, Artificial Sequence
  Description of Artificial Sequence: Synthetic oligonucleotide
agatccagcatctagagacc

SEQ ID NO: 1172 - DNA, 21 bp, Artificial Sequence
  Description of Artificial Sequence: Synthetic oligonucleotide
agatccagcatctagagacct

SEQ ID NO: 1173 - DNA, 20 bp, Artificial Sequence
  Description of Artificial Sequence: Synthetic oligonucleotide
agatctcgtactgaaggaaa

SEQ ID NO: 1174 - DNA, 20 bp, Artificial Sequence
  Description of Artificial Sequence: Synthetic oligonucleotide
agatcttctagataccgcct

SEQ ID NO: 1175 - DNA, 20 bp, Artificial Sequence
  Description of Artificial Sequence: Synthetic oligonucleotide
agatcttgttcccaagaata

SEQ ID NO: 1176 - DNA, 20 bp, Artificial Sequence
  Description of Artificial Sequence: Synthetic oligonucleotide
agatgattaggcagaggtga

SEQ ID NO: 1177 - DNA, 20 bp, Artificial Sequence
  Description of Artificial Sequence: Synthetic oligonucleotide
agatgctggatcttccaaat

SEQ ID NO: 1178 - DNA, 21 bp, Artificial Sequence
  Description of Artificial Sequence: Synthetic oligonucleotide
agatgctgtacagacttggcc

SEQ ID NO: 1179 - DNA, 20 bp, Artificial Sequence
  Description of Artificial Sequence: Synthetic oligonucleotide
agattaaaggtctttgtact

SEQ ID NO: 1180 - DNA, 20 bp, Artificial Sequence
  Description of Artificial Sequence: Synthetic oligonucleotide
agattgaatacatgcataca

SEQ ID NO: 1181 - DNA, 20 bp, Artificial Sequence
  Description of Artificial Sequence: Synthetic oligonucleotide
agcaaaacccaaaagaccca

SEQ ID NO: 1182 - DNA, 20 bp, Artificial Sequence
  Description of Artificial Sequence: Synthetic oligonucleotide
agcaaatccgcctcctgcct

SEQ ID NO: 1183 - DNA, 20 bp, Artificial Sequence
  Description of Artificial Sequence: Synthetic oligonucleotide
agcaacaggagggatacata

SEQ ID NO: 1184 - DNA, 21 bp, Artificial Sequence
  Description of Artificial Sequence: Synthetic oligonucleotide
agcaattctttgctgggggga

SEQ ID NO: 1185 - DNA, 20 bp, Artificial Sequence
  Description of Artificial Sequence: Synthetic oligonucleotide
agcagtagtcatgcaggttc

SEQ ID NO: 1186 - DNA, 20 bp, Artificial Sequence
  Description of Artificial Sequence: Synthetic oligonucleotide
agccgaaaaggttccacgca

SEQ ID NO: 1187 - DNA, 20 bp, Artificial Sequence
  Description of Artificial Sequence: Synthetic oligonucleotide
agcctgagggctccacccca

SEQ ID NO: 1188 - DNA, 20 bp, Artificial Sequence
  Description of Artificial Sequence: Synthetic oligonucleotide
agcgcagggtccccaatcct

SEQ ID NO: 1189 - DNA, 20 bp, Artificial Sequence
  Description of Artificial Sequence: Synthetic oligonucleotide
agctctgtatcgggaagcct

SEQ ID NO: 1190 - DNA, 20 bp, Artificial Sequence
  Description of Artificial Sequence: Synthetic oligonucleotide
agcttggaggcttgaacagt

SEQ ID NO: 1191 - DNA, 20 bp, Artificial Sequence
  Description of Artificial Sequence: Synthetic oligonucleotide
aggaagatgataaaacgccg

SEQ ID NO: 1192 - DNA, 21 bp, Artificial Sequence
  Description of Artificial Sequence: Synthetic oligonucleotide
aggaagttttctaaaacattc

SEQ ID NO: 1193 - DNA, 20 bp, Artificial Sequence
  Description of Artificial Sequence: Synthetic oligonucleotide
aggaattttccgaaagccca

SEQ ID NO: 1194 - DNA, 21 bp, Artificial Sequence
  Description of Artificial Sequence: Synthetic oligonucleotide
aggaattttccgaaagcccag

SEQ ID NO: 1195 - DNA, 20 bp, Artificial Sequence
  Description of Artificial Sequence: Synthetic oligonucleotide
aggacaagttggaggacagg

SEQ ID NO: 1196 - DNA, 20 bp, Artificial Sequence
  Description of Artificial Sequence: Synthetic oligonucleotide
aggaccccttctcgtgttac

SEQ ID NO: 1197 - DNA, 20 bp, Artificial Sequence
  Description of Artificial Sequence: Synthetic oligonucleotide
aggacgtcccgcgcaggatc

SEQ ID NO: 1198 - DNA, 20 bp, Artificial Sequence
  Description of Artificial Sequence: Synthetic oligonucleotide
aggagcagtaaaccctgttc

SEQ ID NO: 1199 - DNA, 20 bp, Artificial Sequence
  Description of Artificial Sequence: Synthetic oligonucleotide
aggagctggagcattcgggc

SEQ ID NO: 1200 - DNA, 20 bp, Artificial Sequence
  Description of Artificial Sequence: Synthetic oligonucleotide
aggaggcggatttgctggca

SEQ ID NO: 1201 - DNA, 20 bp, Artificial Sequence
  Description of Artificial Sequence: Synthetic oligonucleotide
aggagtgcgaatccacactc

SEQ ID NO: 1202 - DNA, 20 bp, Artificial Sequence
  Description of Artificial Sequence: Synthetic oligonucleotide
aggagttgggggaggagatt

SEQ ID NO: 1203 - DNA, 20 bp, Artificial Sequence
  Description of Artificial Sequence: Synthetic oligonucleotide
aggatcctcaaccaccagca

SEQ ID NO: 1204 - DNA, 20 bp, Artificial Sequence
  Description of Artificial Sequence: Synthetic oligonucleotide
aggatcctggaattagagga

SEQ ID NO: 1205 - DNA, 20 bp, Artificial Sequence
  Description of Artificial Sequence: Synthetic oligonucleotide
aggatgaagaggaagatgat

SEQ ID NO: 1206 - DNA, 20 bp, Artificial Sequence
  Description of Artificial Sequence: Synthetic oligonucleotide
aggatgatgggatgggaata

SEQ ID NO: 1207 - DNA, 20 bp, Artificial Sequence
  Description of Artificial Sequence: Synthetic oligonucleotide
aggattaaagacaggtacag

SEQ ID NO: 1208 - DNA, 20 bp, Artificial Sequence
  Description of Artificial Sequence: Synthetic oligonucleotide
aggattcttgtcaacaagaa

SEQ ID NO: 1209 - DNA, 20 bp, Artificial Sequence
  Description of Artificial Sequence: Synthetic oligonucleotide
aggattggggaccctgcgct

SEQ ID NO: 1210 - DNA, 20 bp, Artificial Sequence
  Description of Artificial Sequence: Synthetic oligonucleotide
aggcaggaggcggatttgct

SEQ ID NO: 1211 - DNA, 20 bp, Artificial Sequence
  Description of Artificial Sequence: Synthetic oligonucleotide
aggcccacttacagttaatg

SEQ ID NO: 1212 - DNA, 20 bp, Artificial Sequence
  Description of Artificial Sequence: Synthetic oligonucleotide
aggcctccgtgcggtggggt

SEQ ID NO: 1213 - DNA, 20 bp, Artificial Sequence
  Description of Artificial Sequence: Synthetic oligonucleotide
aggcgggtatattatataag

SEQ ID NO: 1214 - DNA, 21 bp, Artificial Sequence
  Description of Artificial Sequence: Synthetic oligonucleotide
aggctgccttcctgtctggcg

SEQ ID NO: 1215 - DNA, 20 bp, Artificial Sequence
  Description of Artificial Sequence: Synthetic oligonucleotide
aggcttcccgatacagagct

SEQ ID NO: 1216 - DNA, 20 bp, Artificial Sequence
  Description of Artificial Sequence: Synthetic oligonucleotide
aggcttgaacagtaggacat

SEQ ID NO: 1217 - DNA, 20 bp, Artificial Sequence
  Description of Artificial Sequence: Synthetic oligonucleotide
agggactcaagatgctgtac

SEQ ID NO: 1218 - DNA, 21 bp, Artificial Sequence
  Description of Artificial Sequence: Synthetic oligonucleotide
agggagaggcagtagtcggaa

SEQ ID NO: 1219 - DNA, 20 bp, Artificial Sequence
  Description of Artificial Sequence: Synthetic oligonucleotide
agggatacatagaggttcct

SEQ ID NO: 1220 - DNA, 20 bp, Artificial Sequence
  Description of Artificial Sequence: Synthetic oligonucleotide
aggggacctgcctcgtcgtc

SEQ ID NO: 1221 - DNA, 20 bp, Artificial Sequence
  Description of Artificial Sequence: Synthetic oligonucleotide
aggggcatttggtggtctat

SEQ ID NO: 1222 - DNA, 20 bp, Artificial Sequence
  Description of Artificial Sequence: Synthetic oligonucleotide
agggtcgatgtccatgcccc

SEQ ID NO: 1223 - DNA, 20 bp, Artificial Sequence
  Description of Artificial Sequence: Synthetic oligonucleotide
agggtttactgctcctgaac

SEQ ID NO: 1224 - DNA, 21 bp, Artificial Sequence
  Description of Artificial Sequence: Synthetic oligonucleotide
aggtacagtagaagaataaag

SEQ ID NO: 1225 - DNA, 20 bp, Artificial Sequence
  Description of Artificial Sequence: Synthetic oligonucleotide
aggtaggagctggagcattc

SEQ ID NO: 1226 - DNA, 20 bp, Artificial Sequence
  Description of Artificial Sequence: Synthetic oligonucleotide
aggtattgtttacacagaaa

SEQ ID NO: 1227 - DNA, 20 bp, Artificial Sequence
  Description of Artificial Sequence: Synthetic oligonucleotide
aggtcggtcgttgacattgc

SEQ ID NO: 1228 - DNA, 21 bp, Artificial Sequence
  Description of Artificial Sequence: Synthetic oligonucleotide
aggtcggtcgttgacattgca

SEQ ID NO: 1229 - DNA, 20 bp, Artificial Sequence
  Description of Artificial Sequence: Synthetic oligonucleotide
aggtctggagcaaacattat

SEQ ID NO: 1230 - DNA, 20 bp, Artificial Sequence
  Description of Artificial Sequence: Synthetic oligonucleotide
aggtgcgccccgtggtcggt

SEQ ID NO: 1231 - DNA, 20 bp, Artificial Sequence
  Description of Artificial Sequence: Synthetic oligonucleotide
aggtgtccttgttgggattg

SEQ ID NO: 1232 - DNA, 20 bp, Artificial Sequence
  Description of Artificial Sequence: Synthetic oligonucleotide
aggttcaggtattgtttaca

SEQ ID NO: 1233 - DNA, 20 bp, Artificial Sequence
  Description of Artificial Sequence: Synthetic oligonucleotide
aggttccacgcacgcgctga

SEQ ID NO: 1234 - DNA, 20 bp, Artificial Sequence
  Description of Artificial Sequence: Synthetic oligonucleotide
aggttggggactgcgaattt

SEQ ID NO: 1235 - DNA, 20 bp, Artificial Sequence
  Description of Artificial Sequence: Synthetic oligonucleotide
aggtttggtacagcaacagg

SEQ ID NO: 1236 - DNA, 20 bp, Artificial Sequence
  Description of Artificial Sequence: Synthetic oligonucleotide
aggttttatccaaaggttac

SEQ ID NO: 1237 - DNA, 20 bp, Artificial Sequence
  Description of Artificial Sequence: Synthetic oligonucleotide
agtaaagttccccaccttat

SEQ ID NO: 1238 - DNA, 21 bp, Artificial Sequence
  Description of Artificial Sequence: Synthetic oligonucleotide
agtaatgattaactagatgtt

SEQ ID NO: 1239 - DNA, 20 bp, Artificial Sequence
  Description of Artificial Sequence: Synthetic oligonucleotide
agtagaagaataaagaccag

SEQ ID NO: 1240 - DNA, 20 bp, Artificial Sequence
  Description of Artificial Sequence: Synthetic oligonucleotide
agtaggacatgaacaagaga

SEQ ID NO: 1241 - DNA, 20 bp, Artificial Sequence
  Description of Artificial Sequence: Synthetic oligonucleotide
agtagtttccggaagtgttg

SEQ ID NO: 1242 - DNA, 21 bp, Artificial Sequence
  Description of Artificial Sequence: Synthetic oligonucleotide
agtagtttccggaagtgttga

SEQ ID NO: 1243 - DNA, 20 bp, Artificial Sequence
  Description of Artificial Sequence: Synthetic oligonucleotide
agtcattagttccccccagc

SEQ ID NO: 1244 - DNA, 21 bp, Artificial Sequence
  Description of Artificial Sequence: Synthetic oligonucleotide
agtcattagttccccccagca

SEQ ID NO: 1245 - DNA, 20 bp, Artificial Sequence
  Description of Artificial Sequence: Synthetic oligonucleotide
agtccagaagaaccaacaag

SEQ ID NO: 1246 - DNA, 20 bp, Artificial Sequence
  Description of Artificial Sequence: Synthetic oligonucleotide
agtcccaagcgaccccgaga

SEQ ID NO: 1247 - DNA, 20 bp, Artificial Sequence
  Description of Artificial Sequence: Synthetic oligonucleotide
agtcccgataatgtttgctc

SEQ ID NO: 1248 - DNA, 20 bp, Artificial Sequence
  Description of Artificial Sequence: Synthetic oligonucleotide
agtccgcgtaaagagaggtg

SEQ ID NO: 1249 - DNA, 20 bp, Artificial Sequence
  Description of Artificial Sequence: Synthetic oligonucleotide
agtcctcttatgtaagacct

SEQ ID NO: 1250 - DNA, 21 bp, Artificial Sequence
  Description of Artificial Sequence: Synthetic oligonucleotide
agtctttaaacaaacagtctt

SEQ ID NO: 1251 - DNA, 20 bp, Artificial Sequence
  Description of Artificial Sequence: Synthetic oligonucleotide
agtctttgaagtatgcctca

SEQ ID NO: 1252 - DNA, 20 bp, Artificial Sequence
  Description of Artificial Sequence: Synthetic oligonucleotide
agtgaaagcctgcttagatt

SEQ ID NO: 1253 - DNA, 20 bp, Artificial Sequence
  Description of Artificial Sequence: Synthetic oligonucleotide
agtgattggaggttggggac

SEQ ID NO: 1254 - DNA, 20 bp, Artificial Sequence
  Description of Artificial Sequence: Synthetic oligonucleotide
agtgcacacggtccggcaga

SEQ ID NO: 1255 - DNA, 20 bp, Artificial Sequence
  Description of Artificial Sequence: Synthetic oligonucleotide
agtgtctagtttggaagtaa

SEQ ID NO: 1256 - DNA, 21 bp, Artificial Sequence
  Description of Artificial Sequence: Synthetic oligonucleotide
agtgttgataggataggggca

SEQ ID NO: 1257 - DNA, 20 bp, Artificial Sequence
  Description of Artificial Sequence: Synthetic oligonucleotide
agttaatgagaaaagaagat

SEQ ID NO: 1258 - DNA, 20 bp, Artificial Sequence
  Description of Artificial Sequence: Synthetic oligonucleotide
agttatgggtccttgccaca

SEQ ID NO: 1259 - DNA, 20 bp, Artificial Sequence
  Description of Artificial Sequence: Synthetic oligonucleotide
agttatgtcaacactaatat

SEQ ID NO: 1260 - DNA, 20 bp, Artificial Sequence
  Description of Artificial Sequence: Synthetic oligonucleotide
agttccccaccttatgagtc

SEQ ID NO: 1261 - DNA, 20 bp, Artificial Sequence
  Description of Artificial Sequence: Synthetic oligonucleotide
agttccccccagcaaagaat

SEQ ID NO: 1262 - DNA, 20 bp, Artificial Sequence
  Description of Artificial Sequence: Synthetic oligonucleotide
agttccccctagaaaattga

SEQ ID NO: 1263 - DNA, 21 bp, Artificial Sequence
  Description of Artificial Sequence: Synthetic oligonucleotide
agttccccctagaaaattgag

SEQ ID NO: 1264 - DNA, 20 bp, Artificial Sequence
  Description of Artificial Sequence: Synthetic oligonucleotide
agttgcatggtgctggtgcg

SEQ ID NO: 1265 - DNA, 20 bp, Artificial Sequence
  Description of Artificial Sequence: Synthetic oligonucleotide
agttggcagcacagcctagc

SEQ ID NO: 1266 - DNA, 20 bp, Artificial Sequence
  Description of Artificial Sequence: Synthetic oligonucleotide
agtttccggaagtgttgata

SEQ ID NO: 1267 - DNA, 20 bp, Artificial Sequence
  Description of Artificial Sequence: Synthetic oligonucleotide
ataaccacattgtgtaaatg

SEQ ID NO: 1268 - DNA, 20 bp, Artificial Sequence
  Description of Artificial Sequence: Synthetic oligonucleotide
ataactctgttgtcctctcc

SEQ ID NO: 1269 - DNA, 21 bp, Artificial Sequence
  Description of Artificial Sequence: Synthetic oligonucleotide
ataactctgttgtcctctccc

SEQ ID NO: 1270 - DNA, 20 bp, Artificial Sequence
  Description of Artificial Sequence: Synthetic oligonucleotide
ataactgaaagccaaacagt

SEQ ID NO: 1271 - DNA, 20 bp, Artificial Sequence
  Description of Artificial Sequence: Synthetic oligonucleotide
ataactgactactaggtctc

SEQ ID NO: 1272 - DNA, 20 bp, Artificial Sequence
  Description of Artificial Sequence: Synthetic oligonucleotide
ataagagagaaacaacacat

SEQ ID NO: 1273 - DNA, 20 bp, Artificial Sequence
  Description of Artificial Sequence: Synthetic oligonucleotide
ataagggagaggcagtagtc

SEQ ID NO: 1274 - DNA, 20 bp, Artificial Sequence
  Description of Artificial Sequence: Synthetic oligonucleotide
ataatatacccgccttccat

SEQ ID NO: 1275 - DNA, 20 bp, Artificial Sequence
  Description of Artificial Sequence: Synthetic oligonucleotide
atacaggtgcaatttccgtc

SEQ ID NO: 1276 - DNA, 21 bp, Artificial Sequence
  Description of Artificial Sequence: Synthetic oligonucleotide
atacaggtgcaatttccgtcc

SEQ ID NO: 1277 - DNA, 20 bp, Artificial Sequence
  Description of Artificial Sequence: Synthetic oligonucleotide
atacatagaggttccttgag

SEQ ID NO: 1278 - DNA, 21 bp, Artificial Sequence
  Description of Artificial Sequence: Synthetic oligonucleotide
atacatagaggttccttgagc

SEQ ID NO: 1279 - DNA, 20 bp, Artificial Sequence
  Description of Artificial Sequence: Synthetic oligonucleotide
atacatgcatacaagggcat

SEQ ID NO: 1280 - DNA, 20 bp, Artificial Sequence
  Description of Artificial Sequence: Synthetic oligonucleotide
ataccgcctcagctctgtat

SEQ ID NO: 1281 - DNA, 20 bp, Artificial Sequence
  Description of Artificial Sequence: Synthetic oligonucleotide
atacgatgtatatttgcggg

SEQ ID NO: 1282 - DNA, 20 bp, Artificial Sequence
  Description of Artificial Sequence: Synthetic oligonucleotide
atactaacattgaggttccc

SEQ ID NO: 1283 - DNA, 20 bp, Artificial Sequence
  Description of Artificial Sequence: Synthetic oligonucleotide
atagagtatttggtgtcttt

SEQ ID NO: 1284 - DNA, 20 bp, Artificial Sequence
  Description of Artificial Sequence: Synthetic oligonucleotide
atagcagcaggatgaagagg

SEQ ID NO: 1285 - DNA, 20 bp, Artificial Sequence
  Description of Artificial Sequence: Synthetic oligonucleotide
atagcgcctcattttgtggg

SEQ ID NO: 1286 - DNA, 20 bp, Artificial Sequence
  Description of Artificial Sequence: Synthetic oligonucleotide
ataggaattttccgaaagcc

SEQ ID NO: 1287 - DNA, 20 bp, Artificial Sequence
  Description of Artificial Sequence: Synthetic oligonucleotide
atagtccagaagaaccaaca

SEQ ID NO: 1288 - DNA, 21 bp, Artificial Sequence
  Description of Artificial Sequence: Synthetic oligonucleotide
atagtccagaagaaccaacaa

SEQ ID NO: 1289 - DNA, 21 bp, Artificial Sequence
  Description of Artificial Sequence: Synthetic oligonucleotide
atataatatacccgccttcca

SEQ ID NO: 1290 - DNA, 20 bp, Artificial Sequence
  Description of Artificial Sequence: Synthetic oligonucleotide
atatacatcgtatccatggc

SEQ ID NO: 1291 - DNA, 20 bp, Artificial Sequence
  Description of Artificial Sequence: Synthetic oligonucleotide
atatgggcctaaagttcagg

SEQ ID NO: 1292 - DNA, 20 bp, Artificial Sequence
  Description of Artificial Sequence: Synthetic oligonucleotide
atatggtgacccacaaaatg

SEQ ID NO: 1293 - DNA, 20 bp, Artificial Sequence
  Description of Artificial Sequence: Synthetic oligonucleotide
atatttgcgggagaggacaa

SEQ ID NO: 1294 - DNA, 20 bp, Artificial Sequence
  Description of Artificial Sequence: Synthetic oligonucleotide
atatttggtaacctttggat

SEQ ID NO: 1295 - DNA, 20 bp, Artificial Sequence
  Description of Artificial Sequence: Synthetic oligonucleotide
atcaataggcctgttaatag

SEQ ID NO: 1296 - DNA, 20 bp, Artificial Sequence
  Description of Artificial Sequence: Synthetic oligonucleotide
atccaaaggttaccaaatat

SEQ ID NO: 1297 - DNA, 20 bp, Artificial Sequence
  Description of Artificial Sequence: Synthetic oligonucleotide
atccaactggtggtcgggaa

SEQ ID NO: 1298 - DNA, 20 bp, Artificial Sequence
  Description of Artificial Sequence: Synthetic oligonucleotide
atccaatggtaaatatttgg

SEQ ID NO: 1299 - DNA, 20 bp, Artificial Sequence
  Description of Artificial Sequence: Synthetic oligonucleotide
atcccagaggattgctggtg

SEQ ID NO: 1300 - DNA, 21 bp, Artificial Sequence
  Description of Artificial Sequence: Synthetic oligonucleotide
atcccagaggattgctggtgg

SEQ ID NO: 1301 - DNA, 20 bp, Artificial Sequence
  Description of Artificial Sequence: Synthetic oligonucleotide
atcccatcatcctgggcttt

SEQ ID NO: 1302 - DNA, 20 bp, Artificial Sequence
  Description of Artificial Sequence: Synthetic oligonucleotide
atccctcctgttgctgtacc

SEQ ID NO: 1303 - DNA, 20 bp, Artificial Sequence
  Description of Artificial Sequence: Synthetic oligonucleotide
atcctcgagaagattgacga

SEQ ID NO: 1304 - DNA, 20 bp, Artificial Sequence
  Description of Artificial Sequence: Synthetic oligonucleotide
atcctgcggacgacccttct

SEQ ID NO: 1305 - DNA, 20 bp, Artificial Sequence
  Description of Artificial Sequence: Synthetic oligonucleotide
atcgacccttataaagaatt

SEQ ID NO: 1306 - DNA, 20 bp, Artificial Sequence
  Description of Artificial Sequence: Synthetic oligonucleotide
atctagaagatctcgtactg

SEQ ID NO: 1307 - DNA, 20 bp, Artificial Sequence
  Description of Artificial Sequence: Synthetic oligonucleotide
atctagttaatcattacttc

SEQ ID NO: 1308 - DNA, 21 bp, Artificial Sequence
  Description of Artificial Sequence: Synthetic oligonucleotide
atctctttgttttgttagggt

SEQ ID NO: 1309 - DNA, 21 bp, Artificial Sequence
  Description of Artificial Sequence: Synthetic oligonucleotide
atcttccaaattaacacccac

SEQ ID NO: 1310 - DNA, 20 bp, Artificial Sequence
  Description of Artificial Sequence: Synthetic oligonucleotide
atcttcttgttggttcttct

SEQ ID NO: 1311 - DNA, 20 bp, Artificial Sequence
  Description of Artificial Sequence: Synthetic oligonucleotide
atcttgcagagtttggtgaa

SEQ ID NO: 1312 - DNA, 21 bp, Artificial Sequence
  Description of Artificial Sequence: Synthetic oligonucleotide
atctttccaccagcaatcctc

SEQ ID NO: 1313 - DNA, 20 bp, Artificial Sequence
  Description of Artificial Sequence: Synthetic oligonucleotide
atgaacaagagatgattagg

SEQ ID NO: 1314 - DNA, 21 bp, Artificial Sequence
  Description of Artificial Sequence: Synthetic oligonucleotide
atgaacaagagatgattaggc

SEQ ID NO: 1315 - DNA, 20 bp, Artificial Sequence
  Description of Artificial Sequence: Synthetic oligonucleotide
atgacataacccataaaatt

SEQ ID NO: 1316 - DNA, 20 bp, Artificial Sequence
  Description of Artificial Sequence: Synthetic oligonucleotide
atgaccaagccccagccagt

SEQ ID NO: 1317 - DNA, 20 bp, Artificial Sequence
  Description of Artificial Sequence: Synthetic oligonucleotide
atgactctagctacctgggt

SEQ ID NO: 1318 - DNA, 20 bp, Artificial Sequence
  Description of Artificial Sequence: Synthetic oligonucleotide
atgaggattaaagacaggta

SEQ ID NO: 1319 - DNA, 20 bp, Artificial Sequence
  Description of Artificial Sequence: Synthetic oligonucleotide
atgagtgtttctcaaaggtg

SEQ ID NO: 1320 - DNA, 21 bp, Artificial Sequence
  Description of Artificial Sequence: Synthetic oligonucleotide
atgatgggatgggaatacagg

SEQ ID NO: 1321 - DNA, 20 bp, Artificial Sequence
  Description of Artificial Sequence: Synthetic oligonucleotide
atgatgtgttcttgtggcaa

SEQ ID NO: 1322 - DNA, 20 bp, Artificial Sequence
  Description of Artificial Sequence: Synthetic oligonucleotide
atgattaggcagaggtgaaa

SEQ ID NO: 1323 - DNA, 20 bp, Artificial Sequence
  Description of Artificial Sequence: Synthetic oligonucleotide
atgcatacaagggcattaac

SEQ ID NO: 1324 - DNA, 21 bp, Artificial Sequence
  Description of Artificial Sequence: Synthetic oligonucleotide
atgcatacaagggcattaacg

SEQ ID NO: 1325 - DNA, 20 bp, Artificial Sequence
  Description of Artificial Sequence: Synthetic oligonucleotide
atgcatgtattcaatctaag

SEQ ID NO: 1326 - DNA, 20 bp, Artificial Sequence
  Description of Artificial Sequence: Synthetic oligonucleotide
atgcctacagcctcctagta

SEQ ID NO: 1327 - DNA, 20 bp, Artificial Sequence
  Description of Artificial Sequence: Synthetic oligonucleotide
atgcctgctaggttttatcc

SEQ ID NO: 1328 - DNA, 21 bp, Artificial Sequence
  Description of Artificial Sequence: Synthetic oligonucleotide
atgcgacgtgcagaggtgaag

SEQ ID NO: 1329 - DNA, 20 bp, Artificial Sequence
  Description of Artificial Sequence: Synthetic oligonucleotide
atgctgtagatcttgttccc

SEQ ID NO: 1330 - DNA, 20 bp, Artificial Sequence
  Description of Artificial Sequence: Synthetic oligonucleotide
atggacatcgacccttataa

SEQ ID NO: 1331 - DNA, 20 bp, Artificial Sequence
  Description of Artificial Sequence: Synthetic oligonucleotide
atggatacgatgtatatttg

SEQ ID NO: 1332 - DNA, 20 bp, Artificial Sequence
  Description of Artificial Sequence: Synthetic oligonucleotide
atggatcggcagaggagccg

SEQ ID NO: 1333 - DNA, 21 bp, Artificial Sequence
  Description of Artificial Sequence: Synthetic oligonucleotide
atggatcggcagaggagccga

SEQ ID NO: 1334 - DNA, 20 bp, Artificial Sequence
  Description of Artificial Sequence: Synthetic oligonucleotide
atggcactagtaaactgagc

SEQ ID NO: 1335 - DNA, 20 bp, Artificial Sequence
  Description of Artificial Sequence: Synthetic oligonucleotide
atggcccatgaccaagcccc

SEQ ID NO: 1336 - DNA, 21 bp, Artificial Sequence
  Description of Artificial Sequence: Synthetic oligonucleotide
atggcccatgaccaagcccca

SEQ ID NO: 1337 - DNA, 20 bp, Artificial Sequence
  Description of Artificial Sequence: Synthetic oligonucleotide
atgggccatcagcgcgtgcg

SEQ ID NO: 1338 - DNA, 20 bp, Artificial Sequence
  Description of Artificial Sequence: Synthetic oligonucleotide
atggggcagcaaaacccaaa

SEQ ID NO: 1339 - DNA, 21 bp, Artificial Sequence
  Description of Artificial Sequence: Synthetic oligonucleotide
atggtaaatatttggtaacct

SEQ ID NO: 1340 - DNA, 20 bp, Artificial Sequence
  Description of Artificial Sequence: Synthetic oligonucleotide
atggtcccgtgctggtggtt

SEQ ID NO: 1341 - DNA, 20 bp, Artificial Sequence
  Description of Artificial Sequence: Synthetic oligonucleotide
atggtgaggtgaacaatgct

SEQ ID NO: 1342 - DNA, 20 bp, Artificial Sequence
  Description of Artificial Sequence: Synthetic oligonucleotide
atgtatacccaaagacaaaa

SEQ ID NO: 1343 - DNA, 21 bp, Artificial Sequence
  Description of Artificial Sequence: Synthetic oligonucleotide
atgtcaacactaatatgggcc

SEQ ID NO: 1344 - DNA, 20 bp, Artificial Sequence
  Description of Artificial Sequence: Synthetic oligonucleotide
atgtgatgttctccatgttc

SEQ ID NO: 1345 - DNA, 20 bp, Artificial Sequence
  Description of Artificial Sequence: Synthetic oligonucleotide
atgtggttatcctgcgttaa

SEQ ID NO: 1346 - DNA, 20 bp, Artificial Sequence
  Description of Artificial Sequence: Synthetic oligonucleotide
atgttctccatgttcagcgc

SEQ ID NO: 1347 - DNA, 20 bp, Artificial Sequence
  Description of Artificial Sequence: Synthetic oligonucleotide
atgttctggataataaggtt

SEQ ID NO: 1348 - DNA, 20 bp, Artificial Sequence
  Description of Artificial Sequence: Synthetic oligonucleotide
atgttgcccaaggtcttaca

SEQ ID NO: 1349 - DNA, 20 bp, Artificial Sequence
  Description of Artificial Sequence: Synthetic oligonucleotide
attaaagacaggtacagtag

SEQ ID NO: 1350 - DNA, 20 bp, Artificial Sequence
  Description of Artificial Sequence: Synthetic oligonucleotide
attaaaggtctttgtactag

SEQ ID NO: 1351 - DNA, 21 bp, Artificial Sequence
  Description of Artificial Sequence: Synthetic oligonucleotide
attaacacccacccaggtagc

SEQ ID NO: 1352 - DNA, 20 bp, Artificial Sequence
  Description of Artificial Sequence: Synthetic oligonucleotide
attaacaggcctattgattg

SEQ ID NO: 1353 - DNA, 20 bp, Artificial Sequence
  Description of Artificial Sequence: Synthetic oligonucleotide
attaactgtaagtgggccta

SEQ ID NO: 1354 - DNA, 20 bp, Artificial Sequence
  Description of Artificial Sequence: Synthetic oligonucleotide
attccaggatcctcaaccac

SEQ ID NO: 1355 - DNA, 20 bp, Artificial Sequence
  Description of Artificial Sequence: Synthetic oligonucleotide
attcccatcccatcatcctg

SEQ ID NO: 1356 - DNA, 20 bp, Artificial Sequence
  Description of Artificial Sequence: Synthetic oligonucleotide
attcctatgggagtgggcct

SEQ ID NO: 1357 - DNA, 20 bp, Artificial Sequence
  Description of Artificial Sequence: Synthetic oligonucleotide
attcgcactcctccagctta

SEQ ID NO: 1358 - DNA, 20 bp, Artificial Sequence
  Description of Artificial Sequence: Synthetic oligonucleotide
attcttgggaacaagatcta

SEQ ID NO: 1359 - DNA, 20 bp, Artificial Sequence
  Description of Artificial Sequence: Synthetic oligonucleotide
attctttcccgaccaccagt

SEQ ID NO: 1360 - DNA, 20 bp, Artificial Sequence
  Description of Artificial Sequence: Synthetic oligonucleotide
attgaatacatgcatacaag

SEQ ID NO: 1361 - DNA, 20 bp, Artificial Sequence
  Description of Artificial Sequence: Synthetic oligonucleotide
attgagaccttcgtctgcga

SEQ ID NO: 1362 - DNA, 20 bp, Artificial Sequence
  Description of Artificial Sequence: Synthetic oligonucleotide
attgagatcttctgcgacgc

SEQ ID NO: 1363 - DNA, 20 bp, Artificial Sequence
  Description of Artificial Sequence: Synthetic oligonucleotide
attgggacttcaatcccaac

SEQ ID NO: 1364 - DNA, 20 bp, Artificial Sequence
  Description of Artificial Sequence: Synthetic oligonucleotide
attgggggccaagtctgtac

SEQ ID NO: 1365 - DNA, 20 bp, Artificial Sequence
  Description of Artificial Sequence: Synthetic oligonucleotide
attggtaacagcggtaaaaa

SEQ ID NO: 1366 - DNA, 20 bp, Artificial Sequence
  Description of Artificial Sequence: Synthetic oligonucleotide
attgtgggtcttttgggttt

SEQ ID NO: 1367 - DNA, 20 bp, Artificial Sequence
  Description of Artificial Sequence: Synthetic oligonucleotide
attgtgtaaatggggcagca

SEQ ID NO: 1368 - DNA, 20 bp, Artificial Sequence
  Description of Artificial Sequence: Synthetic oligonucleotide
atttaaaccctaacaaaaca

SEQ ID NO: 1369 - DNA, 20 bp, Artificial Sequence
  Description of Artificial Sequence: Synthetic oligonucleotide
atttacaccaagacattatc

SEQ ID NO: 1370 - DNA, 20 bp, Artificial Sequence
  Description of Artificial Sequence: Synthetic oligonucleotide
atttcttgtctcacttttgg

SEQ ID NO: 1371 - DNA, 20 bp, Artificial Sequence
  Description of Artificial Sequence: Synthetic oligonucleotide
atttgcgggagaggacaaca

SEQ ID NO: 1372 - DNA, 20 bp, Artificial Sequence
  Description of Artificial Sequence: Synthetic oligonucleotide
atttgctgtgtttgctctga

SEQ ID NO: 1373 - DNA, 20 bp, Artificial Sequence
  Description of Artificial Sequence: Synthetic oligonucleotide
atttggaagatccagcatct

SEQ ID NO: 1374 - DNA, 20 bp, Artificial Sequence
  Description of Artificial Sequence: Synthetic oligonucleotide
atttggtggtctataagctg

SEQ ID NO: 1375 - DNA, 21 bp, Artificial Sequence
  Description of Artificial Sequence: Synthetic oligonucleotide
atttggtggtctataagctgg

SEQ ID NO: 1376 - DNA, 20 bp, Artificial Sequence
  Description of Artificial Sequence: Synthetic oligonucleotide
atttggtgtctttcggagtg

SEQ ID NO: 1377 - DNA, 20 bp, Artificial Sequence
  Description of Artificial Sequence: Synthetic oligonucleotide
attttatgggttatgtcatt

SEQ ID NO: 1378 - DNA, 21 bp, Artificial Sequence
  Description of Artificial Sequence: Synthetic oligonucleotide
attttttgataatgtcttggt

SEQ ID NO: 1379 - DNA, 20 bp, Artificial Sequence
  Description of Artificial Sequence: Synthetic oligonucleotide
caaaaaatcaaagaatgttt

SEQ ID NO: 1380 - DNA, 20 bp, Artificial Sequence
  Description of Artificial Sequence: Synthetic oligonucleotide
caaaaaatgtgaacagtttg

SEQ ID NO: 1381 - DNA, 20 bp, Artificial Sequence
  Description of Artificial Sequence: Synthetic oligonucleotide
caaaaggcctccgtgcggtg

SEQ ID NO: 1382 - DNA, 20 bp, Artificial Sequence
  Description of Artificial Sequence: Synthetic oligonucleotide
caaaagtgagacaagaaatg

SEQ ID NO: 1383 - DNA, 20 bp, Artificial Sequence
  Description of Artificial Sequence: Synthetic oligonucleotide
caaacacagcaaatccagat

SEQ ID NO: 1384 - DNA, 20 bp, Artificial Sequence
  Description of Artificial Sequence: Synthetic oligonucleotide
caaacacttggcacagacct

SEQ ID NO: 1385 - DNA, 20 bp, Artificial Sequence
  Description of Artificial Sequence: Synthetic oligonucleotide
caaagaattgcttgcctgag

SEQ ID NO: 1386 - DNA, 20 bp, Artificial Sequence
  Description of Artificial Sequence: Synthetic oligonucleotide
caaagacaaaagaaaattgg

SEQ ID NO: 1387 - DNA, 21 bp, Artificial Sequence
  Description of Artificial Sequence: Synthetic oligonucleotide
caaaggacgtcccgcgcagga

SEQ ID NO: 1388 - DNA, 20 bp, Artificial Sequence
  Description of Artificial Sequence: Synthetic oligonucleotide
caaaggtggagacagcgggg

SEQ ID NO: 1389 - DNA, 20 bp, Artificial Sequence
  Description of Artificial Sequence: Synthetic oligonucleotide
caaagtttgtagtatgccct

SEQ ID NO: 1390 - DNA, 20 bp, Artificial Sequence
  Description of Artificial Sequence: Synthetic oligonucleotide
caaatatacatcgtatccat

SEQ ID NO: 1391 - DNA, 20 bp, Artificial Sequence
  Description of Artificial Sequence: Synthetic oligonucleotide
caaatatttaccattggata

SEQ ID NO: 1392 - DNA, 20 bp, Artificial Sequence
  Description of Artificial Sequence: Synthetic oligonucleotide
caaattaacacccacccagg

SEQ ID NO: 1393 - DNA, 21 bp, Artificial Sequence
  Description of Artificial Sequence: Synthetic oligonucleotide
caacacatagcgcctcatttt

SEQ ID NO: 1394 - DNA, 20 bp, Artificial Sequence
  Description of Artificial Sequence: Synthetic oligonucleotide
caacataccttgatagtcca

SEQ ID NO: 1395 - DNA, 20 bp, Artificial Sequence
  Description of Artificial Sequence: Synthetic oligonucleotide
caacattcggtgggcgttca

SEQ ID NO: 1396 - DNA, 21 bp, Artificial Sequence
  Description of Artificial Sequence: Synthetic oligonucleotide
caacattcggtgggcgttcac

SEQ ID NO: 1397 - DNA, 20 bp, Artificial Sequence
  Description of Artificial Sequence: Synthetic oligonucleotide
caacctttcaccaaactctg

SEQ ID NO: 1398 - DNA, 20 bp, Artificial Sequence
  Description of Artificial Sequence: Synthetic oligonucleotide
caacttgtcctggttatcgc

SEQ ID NO: 1399 - DNA, 20 bp, Artificial Sequence
  Description of Artificial Sequence: Synthetic oligonucleotide
caagaaatgtgaaaccacaa

SEQ ID NO: 1400 - DNA, 20 bp, Artificial Sequence
  Description of Artificial Sequence: Synthetic oligonucleotide
caagaagatgaggcatagca

SEQ ID NO: 1401 - DNA, 21 bp, Artificial Sequence
  Description of Artificial Sequence: Synthetic oligonucleotide
caagaagatgaggcatagcag

SEQ ID NO: 1402 - DNA, 20 bp, Artificial Sequence
  Description of Artificial Sequence: Synthetic oligonucleotide
caagaatatggtgacccaca

SEQ ID NO: 1403 - DNA, 20 bp, Artificial Sequence
  Description of Artificial Sequence: Synthetic oligonucleotide
caagacattatcaaaaaatg

SEQ ID NO: 1404 - DNA, 20 bp, Artificial Sequence
  Description of Artificial Sequence: Synthetic oligonucleotide
caagagttgcctgaacttta

SEQ ID NO: 1405 - DNA, 20 bp, Artificial Sequence
  Description of Artificial Sequence: Synthetic oligonucleotide
caagatctacagcatggggc

SEQ ID NO: 1406 - DNA, 20 bp, Artificial Sequence
  Description of Artificial Sequence: Synthetic oligonucleotide
caagcaattctttgctgggg

SEQ ID NO: 1407 - DNA, 20 bp, Artificial Sequence
  Description of Artificial Sequence: Synthetic oligonucleotide
caaggacccataacttccaa

SEQ ID NO: 1408 - DNA, 20 bp, Artificial Sequence
  Description of Artificial Sequence: Synthetic oligonucleotide
caagttggaggacaggaggt

SEQ ID NO: 1409 - DNA, 20 bp, Artificial Sequence
  Description of Artificial Sequence: Synthetic oligonucleotide
caatcaataggcctgttaat

SEQ ID NO: 1410 - DNA, 21 bp, Artificial Sequence
  Description of Artificial Sequence: Synthetic oligonucleotide
caatcaataggcctgttaata

SEQ ID NO: 1411 - DNA, 20 bp, Artificial Sequence
  Description of Artificial Sequence: Synthetic oligonucleotide
caatctggatttgctgtgtt

SEQ ID NO: 1412 - DNA, 20 bp, Artificial Sequence
  Description of Artificial Sequence: Synthetic oligonucleotide
caatgtcaacgaccgacctt

SEQ ID NO: 1413 - DNA, 20 bp, Artificial Sequence
  Description of Artificial Sequence: Synthetic oligonucleotide
caattcgttgacatactttc

SEQ ID NO: 1414 - DNA, 20 bp, Artificial Sequence
  Description of Artificial Sequence: Synthetic oligonucleotide
cacaacctttcaccaaactc

SEQ ID NO: 1415 - DNA, 20 bp, Artificial Sequence
  Description of Artificial Sequence: Synthetic oligonucleotide
cacaagaacacatcatacaa

SEQ ID NO: 1416 - DNA, 20 bp, Artificial Sequence
  Description of Artificial Sequence: Synthetic oligonucleotide
cacaagagttgcctgaactt

SEQ ID NO: 1417 - DNA, 20 bp, Artificial Sequence
  Description of Artificial Sequence: Synthetic oligonucleotide
cacacggtagttccccctag

SEQ ID NO: 1418 - DNA, 20 bp, Artificial Sequence
  Description of Artificial Sequence: Synthetic oligonucleotide
cacacggtccggcagatgag

SEQ ID NO: 1419 - DNA, 20 bp, Artificial Sequence
  Description of Artificial Sequence: Synthetic oligonucleotide
cacagaaaggccttgtaagt

SEQ ID NO: 1420 - DNA, 20 bp, Artificial Sequence
  Description of Artificial Sequence: Synthetic oligonucleotide
cacagacctggccgttgccg

SEQ ID NO: 1421 - DNA, 20 bp, Artificial Sequence
  Description of Artificial Sequence: Synthetic oligonucleotide
cacagacggggagtccgcgt

SEQ ID NO: 1422 - DNA, 20 bp, Artificial Sequence
  Description of Artificial Sequence: Synthetic oligonucleotide
cacatagcgcctcattttgt

SEQ ID NO: 1423 - DNA, 20 bp, Artificial Sequence
  Description of Artificial Sequence: Synthetic oligonucleotide
cacatcatacaaaaaatcaa

SEQ ID NO: 1424 - DNA, 20 bp, Artificial Sequence
  Description of Artificial Sequence: Synthetic oligonucleotide
cacatcatccatataactga

SEQ ID NO: 1425 - DNA, 20 bp, Artificial Sequence
  Description of Artificial Sequence: Synthetic oligonucleotide
cacatttcttgtctcacttt

SEQ ID NO: 1426 - DNA, 20 bp, Artificial Sequence
  Description of Artificial Sequence: Synthetic oligonucleotide
cacattttttgataatgtct

SEQ ID NO: 1427 - DNA, 20 bp, Artificial Sequence
  Description of Artificial Sequence: Synthetic oligonucleotide
caccatactgcactcaggca

SEQ ID NO: 1428 - DNA, 20 bp, Artificial Sequence
  Description of Artificial Sequence: Synthetic oligonucleotide
caccccaaaaggcctccgtg

SEQ ID NO: 1429 - DNA, 20 bp, Artificial Sequence
  Description of Artificial Sequence: Synthetic oligonucleotide
caccgcacggaggccttttg

SEQ ID NO: 1430 - DNA, 20 bp, Artificial Sequence
  Description of Artificial Sequence: Synthetic oligonucleotide
cacctcaccatactgcactc

SEQ ID NO: 1431 - DNA, 20 bp, Artificial Sequence
  Description of Artificial Sequence: Synthetic oligonucleotide
cacctctgcacgtcgcatgg

SEQ ID NO: 1432 - DNA, 20 bp, Artificial Sequence
  Description of Artificial Sequence: Synthetic oligonucleotide
cacctggccagacgccaaca

SEQ ID NO: 1433 - DNA, 20 bp, Artificial Sequence
  Description of Artificial Sequence: Synthetic oligonucleotide
cacggaggccttttggggtg

SEQ ID NO: 1434 - DNA, 20 bp, Artificial Sequence
  Description of Artificial Sequence: Synthetic oligonucleotide
cacggtccggcagatgagaa

SEQ ID NO: 1435 - DNA, 20 bp, Artificial Sequence
  Description of Artificial Sequence: Synthetic oligonucleotide
cactagtaaactgagccagg

SEQ ID NO: 1436 - DNA, 20 bp, Artificial Sequence
  Description of Artificial Sequence: Synthetic oligonucleotide
cactatttacacactctatg

SEQ ID NO: 1437 - DNA, 20 bp, Artificial Sequence
  Description of Artificial Sequence: Synthetic oligonucleotide
cactcaggcaagcaattctt

SEQ ID NO: 1438 - DNA, 20 bp, Artificial Sequence
  Description of Artificial Sequence: Synthetic oligonucleotide
cactggctggggcttggtca

SEQ ID NO: 1439 - DNA, 21 bp, Artificial Sequence
  Description of Artificial Sequence: Synthetic oligonucleotide
cactgtttggctttcagttat

SEQ ID NO: 1440 - DNA, 20 bp, Artificial Sequence
  Description of Artificial Sequence: Synthetic oligonucleotide
cacttacagttaatgagaaa

SEQ ID NO: 1441 - DNA, 21 bp, Artificial Sequence
  Description of Artificial Sequence: Synthetic oligonucleotide
cacttacagttaatgagaaaa

SEQ ID NO: 1442 - DNA, 20 bp, Artificial Sequence
  Description of Artificial Sequence: Synthetic oligonucleotide
cactttctcgccaacttaca

SEQ ID NO: 1443 - DNA, 20 bp, Artificial Sequence
  Description of Artificial Sequence: Synthetic oligonucleotide
cagaagaaccaacaagaaga

SEQ ID NO: 1444 - DNA, 20 bp, Artificial Sequence
  Description of Artificial Sequence: Synthetic oligonucleotide
cagacctgctgcgagcaaaa

SEQ ID NO: 1445 - DNA, 20 bp, Artificial Sequence
  Description of Artificial Sequence: Synthetic oligonucleotide
cagacctggccgttgccggg

SEQ ID NO: 1446 - DNA, 20 bp, Artificial Sequence
  Description of Artificial Sequence: Synthetic oligonucleotide
cagacggggagtccgcgtaa

SEQ ID NO: 1447 - DNA, 20 bp, Artificial Sequence
  Description of Artificial Sequence: Synthetic oligonucleotide
cagagcaaacacagcaaatc

SEQ ID NO: 1448 - DNA, 20 bp, Artificial Sequence
  Description of Artificial Sequence: Synthetic oligonucleotide
cagagctgaggcggtatcta

SEQ ID NO: 1449 - DNA, 20 bp, Artificial Sequence
  Description of Artificial Sequence: Synthetic oligonucleotide
cagagtttggtgaaaggttg

SEQ ID NO: 1450 - DNA, 20 bp, Artificial Sequence
  Description of Artificial Sequence: Synthetic oligonucleotide
cagatgagaaggcacagacg

SEQ ID NO: 1451 - DNA, 20 bp, Artificial Sequence
  Description of Artificial Sequence: Synthetic oligonucleotide
cagcaaagaattgcttgcct

SEQ ID NO: 1452 - DNA, 20 bp, Artificial Sequence
  Description of Artificial Sequence: Synthetic oligonucleotide
cagcaacaggagggatacat

SEQ ID NO: 1453 - DNA, 20 bp, Artificial Sequence
  Description of Artificial Sequence: Synthetic oligonucleotide
cagcacagcctagcagccat

SEQ ID NO: 1454 - DNA, 20 bp, Artificial Sequence
  Description of Artificial Sequence: Synthetic oligonucleotide
cagcaggatgaagaggaaga

SEQ ID NO: 1455 - DNA, 20 bp, Artificial Sequence
  Description of Artificial Sequence: Synthetic oligonucleotide
cagcatggggcagaatcttt

SEQ ID NO: 1456 - DNA, 20 bp, Artificial Sequence
  Description of Artificial Sequence: Synthetic oligonucleotide
cagcctagcagccatggata

SEQ ID NO: 1457 - DNA, 21 bp, Artificial Sequence
  Description of Artificial Sequence: Synthetic oligonucleotide
cagcctcctagtacaaagacc

SEQ ID NO: 1458 - DNA, 20 bp, Artificial Sequence
  Description of Artificial Sequence: Synthetic oligonucleotide
cagcgataaccaggacaagt

SEQ ID NO: 1459 - DNA, 20 bp, Artificial Sequence
  Description of Artificial Sequence: Synthetic oligonucleotide
cagcggtaaaaagggactca

SEQ ID NO: 1460 - DNA, 21 bp, Artificial Sequence
  Description of Artificial Sequence: Synthetic oligonucleotide
cagctctgtatcgggaagcct

SEQ ID NO: 1461 - DNA, 20 bp, Artificial Sequence
  Description of Artificial Sequence: Synthetic oligonucleotide
cagcttggaggcttgaacag

SEQ ID NO: 1462 - DNA, 20 bp, Artificial Sequence
  Description of Artificial Sequence: Synthetic oligonucleotide
caggacaagttggaggacag

SEQ ID NO: 1463 - DNA, 20 bp, Artificial Sequence
  Description of Artificial Sequence: Synthetic oligonucleotide
caggagactctaaggcttcc

SEQ ID NO: 1464 - DNA, 20 bp, Artificial Sequence
  Description of Artificial Sequence: Synthetic oligonucleotide
caggaggcggatttgctggc

SEQ ID NO: 1465 - DNA, 20 bp, Artificial Sequence
  Description of Artificial Sequence: Synthetic oligonucleotide
caggatgaagaggaagatga

SEQ ID NO: 1466 - DNA, 20 bp, Artificial Sequence
  Description of Artificial Sequence: Synthetic oligonucleotide
cagggtccccaatcctcgag

SEQ ID NO: 1467 - DNA, 20 bp, Artificial Sequence
  Description of Artificial Sequence: Synthetic oligonucleotide
caggtacagtagaagaataa

SEQ ID NO: 1468 - DNA, 20 bp, Artificial Sequence
  Description of Artificial Sequence: Synthetic oligonucleotide
caggtattgtttacacagaa

SEQ ID NO: 1469 - DNA, 20 bp, Artificial Sequence
  Description of Artificial Sequence: Synthetic oligonucleotide
caggtgcaatttccgtccga

SEQ ID NO: 1470 - DNA, 20 bp, Artificial Sequence
  Description of Artificial Sequence: Synthetic oligonucleotide
caggtgtccttgttgggatt

SEQ ID NO: 1471 - DNA, 20 bp, Artificial Sequence
  Description of Artificial Sequence: Synthetic oligonucleotide
cagtaaagttccccacctta

SEQ ID NO: 1472 - DNA, 21 bp, Artificial Sequence
  Description of Artificial Sequence: Synthetic oligonucleotide
cagtagaagaataaagaccag

SEQ ID NO: 1473 - DNA, 20 bp, Artificial Sequence
  Description of Artificial Sequence: Synthetic oligonucleotide
cagtatggtgaggtgaacaa

SEQ ID NO: 1474 - DNA, 20 bp, Artificial Sequence
  Description of Artificial Sequence: Synthetic oligonucleotide
cagtctttgaagtatgcctc

SEQ ID NO: 1475 - DNA, 21 bp, Artificial Sequence
  Description of Artificial Sequence: Synthetic oligonucleotide
cagttaatgagaaaagaagat

SEQ ID NO: 1476 - DNA, 20 bp, Artificial Sequence
  Description of Artificial Sequence: Synthetic oligonucleotide
cagttatgtcaacactaata

SEQ ID NO: 1477 - DNA, 20 bp, Artificial Sequence
  Description of Artificial Sequence: Synthetic oligonucleotide
cagttggatccagccttcag

SEQ ID NO: 1478 - DNA, 20 bp, Artificial Sequence
  Description of Artificial Sequence: Synthetic oligonucleotide
cagttggcagcacagcctag

SEQ ID NO: 1479 - DNA, 21 bp, Artificial Sequence
  Description of Artificial Sequence: Synthetic oligonucleotide
cagtttgtaggcccacttaca

SEQ ID NO: 1480 - DNA, 20 bp, Artificial Sequence
  Description of Artificial Sequence: Synthetic oligonucleotide
cataacccataaaattcaga

SEQ ID NO: 1481 - DNA, 20 bp, Artificial Sequence
  Description of Artificial Sequence: Synthetic oligonucleotide
cataaggtggggaactttac

SEQ ID NO: 1482 - DNA, 20 bp, Artificial Sequence
  Description of Artificial Sequence: Synthetic oligonucleotide
catacaagggcattaacgca

SEQ ID NO: 1483 - DNA, 20 bp, Artificial Sequence
  Description of Artificial Sequence: Synthetic oligonucleotide
cataccttgatagtccagaa

SEQ ID NO: 1484 - DNA, 20 bp, Artificial Sequence
  Description of Artificial Sequence: Synthetic oligonucleotide
catagaggttccttgagcag

SEQ ID NO: 1485 - DNA, 20 bp, Artificial Sequence
  Description of Artificial Sequence: Synthetic oligonucleotide
cataggaattttccgaaagc

SEQ ID NO: 1486 - DNA, 21 bp, Artificial Sequence
  Description of Artificial Sequence: Synthetic oligonucleotide
cataggaattttccgaaagcc

SEQ ID NO: 1487 - DNA, 20 bp, Artificial Sequence
  Description of Artificial Sequence: Synthetic oligonucleotide
catattagtgttgacataac

SEQ ID NO: 1488 - DNA, 20 bp, Artificial Sequence
  Description of Artificial Sequence: Synthetic oligonucleotide
catcatcctgggctttcgga

SEQ ID NO: 1489 - DNA, 20 bp, Artificial Sequence
  Description of Artificial Sequence: Synthetic oligonucleotide
catcgtatccatggctgcta

SEQ ID NO: 1490 - DNA, 20 bp, Artificial Sequence
  Description of Artificial Sequence: Synthetic oligonucleotide
catcttcctcttcatcctgc

SEQ ID NO: 1491 - DNA, 20 bp, Artificial Sequence
  Description of Artificial Sequence: Synthetic oligonucleotide
catcttcttgttggttcttc

SEQ ID NO: 1492 - DNA, 20 bp, Artificial Sequence
  Description of Artificial Sequence: Synthetic oligonucleotide
catcttgagtccctttttac

SEQ ID NO: 1493 - DNA, 20 bp, Artificial Sequence
  Description of Artificial Sequence: Synthetic oligonucleotide
catgaccaagccccagccag

SEQ ID NO: 1494 - DNA, 21 bp, Artificial Sequence
  Description of Artificial Sequence: Synthetic oligonucleotide
catgaccaagccccagccagt

SEQ ID NO: 1495 - DNA, 20 bp, Artificial Sequence
  Description of Artificial Sequence: Synthetic oligonucleotide
catgcatacaagggcattaa

SEQ ID NO: 1496 - DNA, 20 bp, Artificial Sequence
  Description of Artificial Sequence: Synthetic oligonucleotide
catgcgacgtgcagaggtga

SEQ ID NO: 1497 - DNA, 20 bp, Artificial Sequence
  Description of Artificial Sequence: Synthetic oligonucleotide
catgctgtagatcttgttcc

SEQ ID NO: 1498 - DNA, 21 bp, Artificial Sequence
  Description of Artificial Sequence: Synthetic oligonucleotide
catgctgtagatcttgttccc

SEQ ID NO: 1499 - DNA, 20 bp, Artificial Sequence
  Description of Artificial Sequence: Synthetic oligonucleotide
catggacatcgacccttata

SEQ ID NO: 1500 - DNA, 20 bp, Artificial Sequence
  Description of Artificial Sequence: Synthetic oligonucleotide
catggtcccgtgctggtggt

SEQ ID NO: 1501 - DNA, 21 bp, Artificial Sequence
  Description of Artificial Sequence: Synthetic oligonucleotide
catggtcccgtgctggtggtt

SEQ ID NO: 1502 - DNA, 20 bp, Artificial Sequence
  Description of Artificial Sequence: Synthetic oligonucleotide
catggtgctggtgcgcagac

SEQ ID NO: 1503 - DNA, 20 bp, Artificial Sequence
  Description of Artificial Sequence: Synthetic oligonucleotide
catgttcagcgcagggtccc

SEQ ID NO: 1504 - DNA, 20 bp, Artificial Sequence
  Description of Artificial Sequence: Synthetic oligonucleotide
cattagttccccccagcaaa

SEQ ID NO: 1505 - DNA, 20 bp, Artificial Sequence
  Description of Artificial Sequence: Synthetic oligonucleotide
cattcggtgggcgttcacgg

SEQ ID NO: 1506 - DNA, 20 bp, Artificial Sequence
  Description of Artificial Sequence: Synthetic oligonucleotide
cattgaggttcccgagattg

SEQ ID NO: 1507 - DNA, 21 bp, Artificial Sequence
  Description of Artificial Sequence: Synthetic oligonucleotide
cattggaaaacaccatctttt

SEQ ID NO: 1508 - DNA, 20 bp, Artificial Sequence
  Description of Artificial Sequence: Synthetic oligonucleotide
cattggaagttatgggtcct

SEQ ID NO: 1509 - DNA, 20 bp, Artificial Sequence
  Description of Artificial Sequence: Synthetic oligonucleotide
cattgtgtaaatggggcagc

SEQ ID NO: 1510 - DNA, 20 bp, Artificial Sequence
  Description of Artificial Sequence: Synthetic oligonucleotide
cattgttcacctcaccatac

SEQ ID NO: 1511 - DNA, 20 bp, Artificial Sequence
  Description of Artificial Sequence: Synthetic oligonucleotide
catttacaccaagacattat

SEQ ID NO: 1512 - DNA, 20 bp, Artificial Sequence
  Description of Artificial Sequence: Synthetic oligonucleotide
catttcttgtctcacttttg

SEQ ID NO: 1513 - DNA, 20 bp, Artificial Sequence
  Description of Artificial Sequence: Synthetic oligonucleotide
catttggtggtctataagct

SEQ ID NO: 1514 - DNA, 20 bp, Artificial Sequence
  Description of Artificial Sequence: Synthetic oligonucleotide
catttgttcagtggttcgta

SEQ ID NO: 1515 - DNA, 20 bp, Artificial Sequence
  Description of Artificial Sequence: Synthetic oligonucleotide
ccaaaagacccacaattcgt

SEQ ID NO: 1516 - DNA, 20 bp, Artificial Sequence
  Description of Artificial Sequence: Synthetic oligonucleotide
ccaaaaggcctccgtgcggt

SEQ ID NO: 1517 - DNA, 20 bp, Artificial Sequence
  Description of Artificial Sequence: Synthetic oligonucleotide
ccaaaccttcggacggaaat

SEQ ID NO: 1518 - DNA, 20 bp, Artificial Sequence
  Description of Artificial Sequence: Synthetic oligonucleotide
ccaaactctgcaagatccca

SEQ ID NO: 1519 - DNA, 20 bp, Artificial Sequence
  Description of Artificial Sequence: Synthetic oligonucleotide
ccaaatatttaccattggat

SEQ ID NO: 1520 - DNA, 20 bp, Artificial Sequence
  Description of Artificial Sequence: Synthetic oligonucleotide
ccaacaagaagatgaggcat

SEQ ID NO: 1521 - DNA, 20 bp, Artificial Sequence
  Description of Artificial Sequence: Synthetic oligonucleotide
ccaagaatatggtgacccac

SEQ ID NO: 1522 - DNA, 20 bp, Artificial Sequence
  Description of Artificial Sequence: Synthetic oligonucleotide
ccaagtctgtacagcatctt

SEQ ID NO: 1523 - DNA, 20 bp, Artificial Sequence
  Description of Artificial Sequence: Synthetic oligonucleotide
ccaatcaataggcctgttaa

SEQ ID NO: 1524 - DNA, 20 bp, Artificial Sequence
  Description of Artificial Sequence: Synthetic oligonucleotide
ccaatcgccagacaggaagg

SEQ ID NO: 1525 - DNA, 21 bp, Artificial Sequence
  Description of Artificial Sequence: Synthetic oligonucleotide
ccaatgaggattaaagacagg

SEQ ID NO: 1526 - DNA, 21 bp, Artificial Sequence
  Description of Artificial Sequence: Synthetic oligonucleotide
ccacaattcgttgacatactt

SEQ ID NO: 1527 - DNA, 20 bp, Artificial Sequence
  Description of Artificial Sequence: Synthetic oligonucleotide
ccacatcatccatataactg

SEQ ID NO: 1528 - DNA, 20 bp, Artificial Sequence
  Description of Artificial Sequence: Synthetic oligonucleotide
ccacattgtgtaaatggggc

SEQ ID NO: 1529 - DNA, 20 bp, Artificial Sequence
  Description of Artificial Sequence: Synthetic oligonucleotide
ccaccgcacggaggcctttt

SEQ ID NO: 1530 - DNA, 20 bp, Artificial Sequence
  Description of Artificial Sequence: Synthetic oligonucleotide
ccactgcatggcctgaggat

SEQ ID NO: 1531 - DNA, 20 bp, Artificial Sequence
  Description of Artificial Sequence: Synthetic oligonucleotide
ccacttacagttaatgagaa

SEQ ID NO: 1532 - DNA, 20 bp, Artificial Sequence
  Description of Artificial Sequence: Synthetic oligonucleotide
ccagacgccaacaaggtagg

SEQ ID NO: 1533 - DNA, 20 bp, Artificial Sequence
  Description of Artificial Sequence: Synthetic oligonucleotide
ccagaggattgctggtggaa

SEQ ID NO: 1534 - DNA, 20 bp, Artificial Sequence
  Description of Artificial Sequence: Synthetic oligonucleotide
ccagattgggacttcaatcc

SEQ ID NO: 1535 - DNA, 21 bp, Artificial Sequence
  Description of Artificial Sequence: Synthetic oligonucleotide
ccagcatctagagacctagta

SEQ ID NO: 1536 - DNA, 20 bp, Artificial Sequence
  Description of Artificial Sequence: Synthetic oligonucleotide
ccagccttcagagcaaacac

SEQ ID NO: 1537 - DNA, 20 bp, Artificial Sequence
  Description of Artificial Sequence: Synthetic oligonucleotide
ccagcttatagaccaccaaa

SEQ ID NO: 1538 - DNA, 21 bp, Artificial Sequence
  Description of Artificial Sequence: Synthetic oligonucleotide
ccaggatgatgggatgggaat

SEQ ID NO: 1539 - DNA, 20 bp, Artificial Sequence
  Description of Artificial Sequence: Synthetic oligonucleotide
ccaggtctgtgccaagtgtt

SEQ ID NO: 1540 - DNA, 20 bp, Artificial Sequence
  Description of Artificial Sequence: Synthetic oligonucleotide
ccaggtgtccttgttgggat

SEQ ID NO: 1541 - DNA, 20 bp, Artificial Sequence
  Description of Artificial Sequence: Synthetic oligonucleotide
ccagtgggggttgcgtcagc

SEQ ID NO: 1542 - DNA, 20 bp, Artificial Sequence
  Description of Artificial Sequence: Synthetic oligonucleotide
ccagttggatccagccttca

SEQ ID NO: 1543 - DNA, 20 bp, Artificial Sequence
  Description of Artificial Sequence: Synthetic oligonucleotide
ccatactgcactcaggcaag

SEQ ID NO: 1544 - DNA, 21 bp, Artificial Sequence
  Description of Artificial Sequence: Synthetic oligonucleotide
ccatagagtgtgtaaatagtg

SEQ ID NO: 1545 - DNA, 20 bp, Artificial Sequence
  Description of Artificial Sequence: Synthetic oligonucleotide
ccatataactgaaagccaaa

SEQ ID NO: 1546 - DNA, 20 bp, Artificial Sequence
  Description of Artificial Sequence: Synthetic oligonucleotide
ccatcatcctgggctttcgg

SEQ ID NO: 1547 - DNA, 20 bp, Artificial Sequence
  Description of Artificial Sequence: Synthetic oligonucleotide
ccatgcgacgtgcagaggtg

SEQ ID NO: 1548 - DNA, 20 bp, Artificial Sequence
  Description of Artificial Sequence: Synthetic oligonucleotide
ccatggatacgatgtatatt

SEQ ID NO: 1549 - DNA, 20 bp, Artificial Sequence
  Description of Artificial Sequence: Synthetic oligonucleotide
ccatggctgctaggctgtgc

SEQ ID NO: 1550 - DNA, 20 bp, Artificial Sequence
  Description of Artificial Sequence: Synthetic oligonucleotide
ccatttgttcagtggttcgt

SEQ ID NO: 1551 - DNA, 20 bp, Artificial Sequence
  Description of Artificial Sequence: Synthetic oligonucleotide
cccaaaaggcctccgtgcgg

SEQ ID NO: 1552 - DNA, 20 bp, Artificial Sequence
  Description of Artificial Sequence: Synthetic oligonucleotide
cccaactcctcccagtcttt

SEQ ID NO: 1553 - DNA, 20 bp, Artificial Sequence
  Description of Artificial Sequence: Synthetic oligonucleotide
cccaccgcacggaggccttt

SEQ ID NO: 1554 - DNA, 20 bp, Artificial Sequence
  Description of Artificial Sequence: Synthetic oligonucleotide
cccacttacagttaatgaga

SEQ ID NO: 1555 - DNA, 20 bp, Artificial Sequence
  Description of Artificial Sequence: Synthetic oligonucleotide
cccagaggattgctggtgga

SEQ ID NO: 1556 - DNA, 20 bp, Artificial Sequence
  Description of Artificial Sequence: Synthetic oligonucleotide
cccatcatcctgggctttcg

SEQ ID NO: 1557 - DNA, 21 bp, Artificial Sequence
  Description of Artificial Sequence: Synthetic oligonucleotide
ccccaaaaggcctccgtgcgg

SEQ ID NO: 1558 - DNA, 20 bp, Artificial Sequence
  Description of Artificial Sequence: Synthetic oligonucleotide
ccccaactcctcccagtctt

SEQ ID NO: 1559 - DNA, 21 bp, Artificial Sequence
  Description of Artificial Sequence: Synthetic oligonucleotide
ccccaccgcacggaggccttt

SEQ ID NO: 1560 - DNA, 20 bp, Artificial Sequence
  Description of Artificial Sequence: Synthetic oligonucleotide
ccccaccttatgagtccaag

SEQ ID NO: 1561 - DNA, 20 bp, Artificial Sequence
  Description of Artificial Sequence: Synthetic oligonucleotide
ccccgagaagggtcgtccgc

SEQ ID NO: 1562 - DNA, 20 bp, Artificial Sequence
  Description of Artificial Sequence: Synthetic oligonucleotide
ccccgcctgtaacacgagaa

SEQ ID NO: 1563 - DNA, 20 bp, Artificial Sequence
  Description of Artificial Sequence: Synthetic oligonucleotide
ccccgctgtctccacctttg

SEQ ID NO: 1564 - DNA, 20 bp, Artificial Sequence
  Description of Artificial Sequence: Synthetic oligonucleotide
ccccgttgcccggcaacggc

SEQ ID NO: 1565 - DNA, 20 bp, Artificial Sequence
  Description of Artificial Sequence: Synthetic oligonucleotide
ccccttctcgtgttacaggc

SEQ ID NO: 1566 - DNA, 20 bp, Artificial Sequence
  Description of Artificial Sequence: Synthetic oligonucleotide
cccgaccaccagttggatcc

SEQ ID NO: 1567 - DNA, 20 bp, Artificial Sequence
  Description of Artificial Sequence: Synthetic oligonucleotide
cccgagaagggtcgtccgca

SEQ ID NO: 1568 - DNA, 20 bp, Artificial Sequence
  Description of Artificial Sequence: Synthetic oligonucleotide
cccgcctgtaacacgagaag

SEQ ID NO: 1569 - DNA, 20 bp, Artificial Sequence
  Description of Artificial Sequence: Synthetic oligonucleotide
cccgccttccatagagtgtg

SEQ ID NO: 1570 - DNA, 20 bp, Artificial Sequence
  Description of Artificial Sequence: Synthetic oligonucleotide
cccgcgcaggatccagttgg

SEQ ID NO: 1571 - DNA, 20 bp, Artificial Sequence
  Description of Artificial Sequence: Synthetic oligonucleotide
cccgctgtctccacctttga

SEQ ID NO: 1572 - DNA, 20 bp, Artificial Sequence
  Description of Artificial Sequence: Synthetic oligonucleotide
cccgtcggcgctgaatcctg

SEQ ID NO: 1573 - DNA, 20 bp, Artificial Sequence
  Description of Artificial Sequence: Synthetic oligonucleotide
cccgtggtcggtcggaacgg

SEQ ID NO: 1574 - DNA, 20 bp, Artificial Sequence
  Description of Artificial Sequence: Synthetic oligonucleotide
cccgttgcccggcaacggcc

SEQ ID NO: 1575 - DNA, 20 bp, Artificial Sequence
  Description of Artificial Sequence: Synthetic oligonucleotide
cccgtttgtcctctaattcc

SEQ ID NO: 1576 - DNA, 20 bp, Artificial Sequence
  Description of Artificial Sequence: Synthetic oligonucleotide
ccctaacaaaacaaagagat

SEQ ID NO: 1577 - DNA, 20 bp, Artificial Sequence
  Description of Artificial Sequence: Synthetic oligonucleotide
ccctatcctatcaacacttc

SEQ ID NO: 1578 - DNA, 20 bp, Artificial Sequence
  Description of Artificial Sequence: Synthetic oligonucleotide
ccctgctggtggctccagtt

SEQ ID NO: 1579 - DNA, 20 bp, Artificial Sequence
  Description of Artificial Sequence: Synthetic oligonucleotide
cccttatcgtcaatcttctc

SEQ ID NO: 1580 - DNA, 20 bp, Artificial Sequence
  Description of Artificial Sequence: Synthetic oligonucleotide
cccttctccgtctgccgttc

SEQ ID NO: 1581 - DNA, 20 bp, Artificial Sequence
  Description of Artificial Sequence: Synthetic oligonucleotide
cccttctcgtgttacaggcg

SEQ ID NO: 1582 - DNA, 20 bp, Artificial Sequence
  Description of Artificial Sequence: Synthetic oligonucleotide
ccgaaaaggttccacgcacg

SEQ ID NO: 1583 - DNA, 21 bp, Artificial Sequence
  Description of Artificial Sequence: Synthetic oligonucleotide
ccgaaaaggttccacgcacgc

SEQ ID NO: 1584 - DNA, 20 bp, Artificial Sequence
  Description of Artificial Sequence: Synthetic oligonucleotide
ccgaaggtttggtacagcaa

SEQ ID NO: 1585 - DNA, 20 bp, Artificial Sequence
  Description of Artificial Sequence: Synthetic oligonucleotide
ccgaccttgaggcatacttc

SEQ ID NO: 1586 - DNA, 20 bp, Artificial Sequence
  Description of Artificial Sequence: Synthetic oligonucleotide
ccgcaggattcagcgccgac

SEQ ID NO: 1587 - DNA, 20 bp, Artificial Sequence
  Description of Artificial Sequence: Synthetic oligonucleotide
ccgcctcagctctgtatcgg

SEQ ID NO: 1588 - DNA, 20 bp, Artificial Sequence
  Description of Artificial Sequence: Synthetic oligonucleotide
ccgcgcaggatccagttggc

SEQ ID NO: 1589 - DNA, 20 bp, Artificial Sequence
  Description of Artificial Sequence: Synthetic oligonucleotide
ccgctgtctccacctttgag

SEQ ID NO: 1590 - DNA, 20 bp, Artificial Sequence
  Description of Artificial Sequence: Synthetic oligonucleotide
ccgcttgttttgctcgcagc

SEQ ID NO: 1591 - DNA, 20 bp, Artificial Sequence
  Description of Artificial Sequence: Synthetic oligonucleotide
ccggaagtgttgataggata

SEQ ID NO: 1592 - DNA, 20 bp, Artificial Sequence
  Description of Artificial Sequence: Synthetic oligonucleotide
ccgtcggcgctgaatcctgc

SEQ ID NO: 1593 - DNA, 20 bp, Artificial Sequence
  Description of Artificial Sequence: Synthetic oligonucleotide
ccgtgcggtggggtgaaacc

SEQ ID NO: 1594 - DNA, 20 bp, Artificial Sequence
  Description of Artificial Sequence: Synthetic oligonucleotide
ccgtggtcggtcggaacggc

SEQ ID NO: 1595 - DNA, 20 bp, Artificial Sequence
  Description of Artificial Sequence: Synthetic oligonucleotide
ccgttgccgggcaacggggt

SEQ ID NO: 1596 - DNA, 21 bp, Artificial Sequence
  Description of Artificial Sequence: Synthetic oligonucleotide
ccgtttctcctggctcagttt

SEQ ID NO: 1597 - DNA, 20 bp, Artificial Sequence
  Description of Artificial Sequence: Synthetic oligonucleotide
ccgtttgtcctctaattcca

SEQ ID NO: 1598 - DNA, 20 bp, Artificial Sequence
  Description of Artificial Sequence: Synthetic oligonucleotide
cctaacaaaacaaagagatg

SEQ ID NO: 1599 - DNA, 20 bp, Artificial Sequence
  Description of Artificial Sequence: Synthetic oligonucleotide
cctaatatacatttacacca

SEQ ID NO: 1600 - DNA, 20 bp, Artificial Sequence
  Description of Artificial Sequence: Synthetic oligonucleotide
cctacagcctcctagtacaa

SEQ ID NO: 1601 - DNA, 20 bp, Artificial Sequence
  Description of Artificial Sequence: Synthetic oligonucleotide
cctatcctatcaacacttcc

SEQ ID NO: 1602 - DNA, 20 bp, Artificial Sequence
  Description of Artificial Sequence: Synthetic oligonucleotide
cctccagcttatagaccacc

SEQ ID NO: 1603 - DNA, 20 bp, Artificial Sequence
  Description of Artificial Sequence: Synthetic oligonucleotide
cctcctagtacaaagacctt

SEQ ID NO: 1604 - DNA, 20 bp, Artificial Sequence
  Description of Artificial Sequence: Synthetic oligonucleotide
cctcgagaagattgacgata

SEQ ID NO: 1605 - DNA, 21 bp, Artificial Sequence
  Description of Artificial Sequence: Synthetic oligonucleotide
cctcgcctcgcagacgaaggt

SEQ ID NO: 1606 - DNA, 20 bp, Artificial Sequence
  Description of Artificial Sequence: Synthetic oligonucleotide
cctctatgtatccctcctgt

SEQ ID NO: 1607 - DNA, 20 bp, Artificial Sequence
  Description of Artificial Sequence: Synthetic oligonucleotide
cctctcactctgggatcttg

SEQ ID NO: 1608 - DNA, 20 bp, Artificial Sequence
  Description of Artificial Sequence: Synthetic oligonucleotide
cctctgggattctttcccga

SEQ ID NO: 1609 - DNA, 20 bp, Artificial Sequence
  Description of Artificial Sequence: Synthetic oligonucleotide
cctgaactttaggcccatat

SEQ ID NO: 1610 - DNA, 20 bp, Artificial Sequence
  Description of Artificial Sequence: Synthetic oligonucleotide
cctgaggatgagtgtttctc

SEQ ID NO: 1611 - DNA, 20 bp, Artificial Sequence
  Description of Artificial Sequence: Synthetic oligonucleotide
cctgagggctccaccccaaa

SEQ ID NO: 1612 - DNA, 20 bp, Artificial Sequence
  Description of Artificial Sequence: Synthetic oligonucleotide
cctgcatgactactgctcaa

SEQ ID NO: 1613 - DNA, 20 bp, Artificial Sequence
  Description of Artificial Sequence: Synthetic oligonucleotide
cctgcctcgtcgtctaacaa

SEQ ID NO: 1614 - DNA, 21 bp, Artificial Sequence
  Description of Artificial Sequence: Synthetic oligonucleotide
cctgcctcgtcgtctaacaac

SEQ ID NO: 1615 - DNA, 20 bp, Artificial Sequence
  Description of Artificial Sequence: Synthetic oligonucleotide
cctgcggacgacccttctcg

SEQ ID NO: 1616 - DNA, 20 bp, Artificial Sequence
  Description of Artificial Sequence: Synthetic oligonucleotide
cctgcgttaatgcccttgta

SEQ ID NO: 1617 - DNA, 20 bp, Artificial Sequence
  Description of Artificial Sequence: Synthetic oligonucleotide
cctgctgcgagcaaaacaag

SEQ ID NO: 1618 - DNA, 20 bp, Artificial Sequence
  Description of Artificial Sequence: Synthetic oligonucleotide
cctggaattagaggacaaac

SEQ ID NO: 1619 - DNA, 20 bp, Artificial Sequence
  Description of Artificial Sequence: Synthetic oligonucleotide
cctggccagacgccaacaag

SEQ ID NO: 1620 - DNA, 20 bp, Artificial Sequence
  Description of Artificial Sequence: Synthetic oligonucleotide
cctggccgttgccgggcaac

SEQ ID NO: 1621 - DNA, 20 bp, Artificial Sequence
  Description of Artificial Sequence: Synthetic oligonucleotide
cctgggtgggtgttaatttg

SEQ ID NO: 1622 - DNA, 20 bp, Artificial Sequence
  Description of Artificial Sequence: Synthetic oligonucleotide
cctgtctggcgattggtgga

SEQ ID NO: 1623 - DNA, 20 bp, Artificial Sequence
  Description of Artificial Sequence: Synthetic oligonucleotide
cctgtctttaatcctcattg

SEQ ID NO: 1624 - DNA, 20 bp, Artificial Sequence
  Description of Artificial Sequence: Synthetic oligonucleotide
cctgttaataggaagttttc

SEQ ID NO: 1625 - DNA, 20 bp, Artificial Sequence
  Description of Artificial Sequence: Synthetic oligonucleotide
ccttatcgtcaatcttctcg

SEQ ID NO: 1626 - DNA, 21 bp, Artificial Sequence
  Description of Artificial Sequence: Synthetic oligonucleotide
ccttattatccagaacatcta

SEQ ID NO: 1627 - DNA, 20 bp, Artificial Sequence
  Description of Artificial Sequence: Synthetic oligonucleotide
ccttcagtacgagatcttct

SEQ ID NO: 1628 - DNA, 20 bp, Artificial Sequence
  Description of Artificial Sequence: Synthetic oligonucleotide
ccttcctgtctggcgattgg

SEQ ID NO: 1629 - DNA, 20 bp, Artificial Sequence
  Description of Artificial Sequence: Synthetic oligonucleotide
ccttcgtctgcgaggcgagg

SEQ ID NO: 1630 - DNA, 20 bp, Artificial Sequence
  Description of Artificial Sequence: Synthetic oligonucleotide
ccttgatagtccagaagaac

SEQ ID NO: 1631 - DNA, 20 bp, Artificial Sequence
  Description of Artificial Sequence: Synthetic oligonucleotide
ccttgggtggctttggggca

SEQ ID NO: 1632 - DNA, 20 bp, Artificial Sequence
  Description of Artificial Sequence: Synthetic oligonucleotide
ccttgttgggattgaagtcc

SEQ ID NO: 1633 - DNA, 20 bp, Artificial Sequence
  Description of Artificial Sequence: Synthetic oligonucleotide
cctttggataaaacctagca

SEQ ID NO: 1634 - DNA, 20 bp, Artificial Sequence
  Description of Artificial Sequence: Synthetic oligonucleotide
ccttttggggtggagccctc

SEQ ID NO: 1635 - DNA, 20 bp, Artificial Sequence
  Description of Artificial Sequence: Synthetic oligonucleotide
cgaaggtttggtacagcaac

SEQ ID NO: 1636 - DNA, 20 bp, Artificial Sequence
  Description of Artificial Sequence: Synthetic oligonucleotide
cgaagtgcacacggtccggc

SEQ ID NO: 1637 - DNA, 21 bp, Artificial Sequence
  Description of Artificial Sequence: Synthetic oligonucleotide
cgaattttggccaagacacac

SEQ ID NO: 1638 - DNA, 20 bp, Artificial Sequence
  Description of Artificial Sequence: Synthetic oligonucleotide
cgaccccgagaagggtcgtc

SEQ ID NO: 1639 - DNA, 20 bp, Artificial Sequence
  Description of Artificial Sequence: Synthetic oligonucleotide
cgacccttataaagaatttg

SEQ ID NO: 1640 - DNA, 20 bp, Artificial Sequence
  Description of Artificial Sequence: Synthetic oligonucleotide
cgacccttctcggggtcgct

SEQ ID NO: 1641 - DNA, 20 bp, Artificial Sequence
  Description of Artificial Sequence: Synthetic oligonucleotide
cgaccttgaggcatacttca

SEQ ID NO: 1642 - DNA, 20 bp, Artificial Sequence
  Description of Artificial Sequence: Synthetic oligonucleotide
cgacgtgcagaggtgaagcg

SEQ ID NO: 1643 - DNA, 20 bp, Artificial Sequence
  Description of Artificial Sequence: Synthetic oligonucleotide
cgagaaagtgaaagcctgct

SEQ ID NO: 1644 - DNA, 20 bp, Artificial Sequence
  Description of Artificial Sequence: Synthetic oligonucleotide
cgagaagattgacgataagg

SEQ ID NO: 1645 - DNA, 20 bp, Artificial Sequence
  Description of Artificial Sequence: Synthetic oligonucleotide
cgaggcaggtcccctagaag

SEQ ID NO: 1646 - DNA, 20 bp, Artificial Sequence
  Description of Artificial Sequence: Synthetic oligonucleotide
cgagggagttcttcttctag

SEQ ID NO: 1647 - DNA, 20 bp, Artificial Sequence
  Description of Artificial Sequence: Synthetic oligonucleotide
cgatgtatatttgcgggaga

SEQ ID NO: 1648 - DNA, 20 bp, Artificial Sequence
  Description of Artificial Sequence: Synthetic oligonucleotide
cgattgagaccttcgtctgc

SEQ ID NO: 1649 - DNA, 20 bp, Artificial Sequence
  Description of Artificial Sequence: Synthetic oligonucleotide
cgattggtggaggcaggagg

SEQ ID NO: 1650 - DNA, 21 bp, Artificial Sequence
  Description of Artificial Sequence: Synthetic oligonucleotide
cgcaacccccactggctgggg

SEQ ID NO: 1651 - DNA, 20 bp, Artificial Sequence
  Description of Artificial Sequence: Synthetic oligonucleotide
cgcacggaggccttttgggg

SEQ ID NO: 1652 - DNA, 20 bp, Artificial Sequence
  Description of Artificial Sequence: Synthetic oligonucleotide
cgcaggataaccacattgtg

SEQ ID NO: 1653 - DNA, 20 bp, Artificial Sequence
  Description of Artificial Sequence: Synthetic oligonucleotide
cgcaggattcagcgccgacg

SEQ ID NO: 1654 - DNA, 20 bp, Artificial Sequence
  Description of Artificial Sequence: Synthetic oligonucleotide
cgcagggtccccaatcctcg

SEQ ID NO: 1655 - DNA, 21 bp, Artificial Sequence
  Description of Artificial Sequence: Synthetic oligonucleotide
cgcagggtccccaatcctcga

SEQ ID NO: 1656 - DNA, 20 bp, Artificial Sequence
  Description of Artificial Sequence: Synthetic oligonucleotide
cgcagtatggatcggcagag

SEQ ID NO: 1657 - DNA, 20 bp, Artificial Sequence
  Description of Artificial Sequence: Synthetic oligonucleotide
cgcatggagaccaccgtgaa

SEQ ID NO: 1658 - DNA, 20 bp, Artificial Sequence
  Description of Artificial Sequence: Synthetic oligonucleotide
cgccccgtggtcggtcggaa

SEQ ID NO: 1659 - DNA, 20 bp, Artificial Sequence
  Description of Artificial Sequence: Synthetic oligonucleotide
cgcctcagctctgtatcggg

SEQ ID NO: 1660 - DNA, 20 bp, Artificial Sequence
  Description of Artificial Sequence: Synthetic oligonucleotide
cgcctcctgcctccaccaat

SEQ ID NO: 1661 - DNA, 20 bp, Artificial Sequence
  Description of Artificial Sequence: Synthetic oligonucleotide
cgcctcgcagacgaaggtct

SEQ ID NO: 1662 - DNA, 20 bp, Artificial Sequence
  Description of Artificial Sequence: Synthetic oligonucleotide
cgcgctgatggcccatgacc

SEQ ID NO: 1663 - DNA, 20 bp, Artificial Sequence
  Description of Artificial Sequence: Synthetic oligonucleotide
cgcgtgcgtggaaccttttc

SEQ ID NO: 1664 - DNA, 20 bp, Artificial Sequence
  Description of Artificial Sequence: Synthetic oligonucleotide
cggaaaattcctatgggagt

SEQ ID NO: 1665 - DNA, 20 bp, Artificial Sequence
  Description of Artificial Sequence: Synthetic oligonucleotide
cggaaactactgttgttaga

SEQ ID NO: 1666 - DNA, 20 bp, Artificial Sequence
  Description of Artificial Sequence: Synthetic oligonucleotide
cggaacggcagacggagaag

SEQ ID NO: 1667 - DNA, 20 bp, Artificial Sequence
  Description of Artificial Sequence: Synthetic oligonucleotide
cggaagtgttgataggatag

SEQ ID NO: 1668 - DNA, 20 bp, Artificial Sequence
  Description of Artificial Sequence: Synthetic oligonucleotide
cggcagacggagaaggggac

SEQ ID NO: 1669 - DNA, 20 bp, Artificial Sequence
  Description of Artificial Sequence: Synthetic oligonucleotide
cggcgattgagaccttcgtc

SEQ ID NO: 1670 - DNA, 20 bp, Artificial Sequence
  Description of Artificial Sequence: Synthetic oligonucleotide
cgggaagccttagagtctcc

SEQ ID NO: 1671 - DNA, 20 bp, Artificial Sequence
  Description of Artificial Sequence: Synthetic oligonucleotide
cgggcaacggggtaaaggtt

SEQ ID NO: 1672 - DNA, 20 bp, Artificial Sequence
  Description of Artificial Sequence: Synthetic oligonucleotide
cgggctgaggcccactccca

SEQ ID NO: 1673 - DNA, 21 bp, Artificial Sequence
  Description of Artificial Sequence: Synthetic oligonucleotide
cgggctgaggcccactcccat

SEQ ID NO: 1674 - DNA, 20 bp, Artificial Sequence
  Description of Artificial Sequence: Synthetic oligonucleotide
cgggctgggtttcaccccac

SEQ ID NO: 1675 - DNA, 20 bp, Artificial Sequence
  Description of Artificial Sequence: Synthetic oligonucleotide
cggggagtccgcgtaaagag

SEQ ID NO: 1676 - DNA, 20 bp, Artificial Sequence
  Description of Artificial Sequence: Synthetic oligonucleotide
cggggtttttcttgttgaca

SEQ ID NO: 1677 - DNA, 20 bp, Artificial Sequence
  Description of Artificial Sequence: Synthetic oligonucleotide
cgggtatattatataagaga

SEQ ID NO: 1678 - DNA, 20 bp, Artificial Sequence
  Description of Artificial Sequence: Synthetic oligonucleotide
cggtaaaaagggactcaaga

SEQ ID NO: 1679 - DNA, 20 bp, Artificial Sequence
  Description of Artificial Sequence: Synthetic oligonucleotide
cggtcggaacggcagacgga

SEQ ID NO: 1680 - DNA, 20 bp, Artificial Sequence
  Description of Artificial Sequence: Synthetic oligonucleotide
cggtggggtgaaacccagcc

SEQ ID NO: 1681 - DNA, 20 bp, Artificial Sequence
  Description of Artificial Sequence: Synthetic oligonucleotide
cggtttctcttccaaaagtg

SEQ ID NO: 1682 - DNA, 20 bp, Artificial Sequence
  Description of Artificial Sequence: Synthetic oligonucleotide
cgtaaacaaaggacgtcccg

SEQ ID NO: 1683 - DNA, 20 bp, Artificial Sequence
  Description of Artificial Sequence: Synthetic oligonucleotide
cgtactgaaggaaagaagtc

SEQ ID NO: 1684 - DNA, 20 bp, Artificial Sequence
  Description of Artificial Sequence: Synthetic oligonucleotide
cgtcaatcttctcgaggatt

SEQ ID NO: 1685 - DNA, 20 bp, Artificial Sequence
  Description of Artificial Sequence: Synthetic oligonucleotide
cgtcccgcgcaggatccagt

SEQ ID NO: 1686 - DNA, 20 bp, Artificial Sequence
  Description of Artificial Sequence: Synthetic oligonucleotide
cgtccgaaggtttggtacag

SEQ ID NO: 1687 - DNA, 20 bp, Artificial Sequence
  Description of Artificial Sequence: Synthetic oligonucleotide
cgtcgcatggagaccaccgt

SEQ ID NO: 1688 - DNA, 20 bp, Artificial Sequence
  Description of Artificial Sequence: Synthetic oligonucleotide
cgtctaacaacagtagtttc

SEQ ID NO: 1689 - DNA, 21 bp, Artificial Sequence
  Description of Artificial Sequence: Synthetic oligonucleotide
cgtctaacaacagtagtttcc

SEQ ID NO: 1690 - DNA, 20 bp, Artificial Sequence
  Description of Artificial Sequence: Synthetic oligonucleotide
cgtgaacgcccaccgaatgt

SEQ ID NO: 1691 - DNA, 20 bp, Artificial Sequence
  Description of Artificial Sequence: Synthetic oligonucleotide
cgtgcggtggggtgaaaccc

SEQ ID NO: 1692 - DNA, 21 bp, Artificial Sequence
  Description of Artificial Sequence: Synthetic oligonucleotide
cgtgctggtggttgaggatcc

SEQ ID NO: 1693 - DNA, 20 bp, Artificial Sequence
  Description of Artificial Sequence: Synthetic oligonucleotide
cgttcacggtggtctccatg

SEQ ID NO: 1694 - DNA, 20 bp, Artificial Sequence
  Description of Artificial Sequence: Synthetic oligonucleotide
cgttgacattgcagagagtc

SEQ ID NO: 1695 - DNA, 21 bp, Artificial Sequence
  Description of Artificial Sequence: Synthetic oligonucleotide
cgttgacattgcagagagtcc

SEQ ID NO: 1696 - DNA, 20 bp, Artificial Sequence
  Description of Artificial Sequence: Synthetic oligonucleotide
cgttgccgggcaacggggta

SEQ ID NO: 1697 - DNA, 20 bp, Artificial Sequence
  Description of Artificial Sequence: Synthetic oligonucleotide
ctaacaacagtagtttccgg

SEQ ID NO: 1698 - DNA, 20 bp, Artificial Sequence
  Description of Artificial Sequence: Synthetic oligonucleotide
ctaatatgggcctaaagttc

SEQ ID NO: 1699 - DNA, 21 bp, Artificial Sequence
  Description of Artificial Sequence: Synthetic oligonucleotide
ctaatgactctagctacctgg

SEQ ID NO: 1700 - DNA, 20 bp, Artificial Sequence
  Description of Artificial Sequence: Synthetic oligonucleotide
ctaccttgttggcgtctggc

SEQ ID NO: 1701 - DNA, 20 bp, Artificial Sequence
  Description of Artificial Sequence: Synthetic oligonucleotide
ctactaggtctctagatgct

SEQ ID NO: 1702 - DNA, 20 bp, Artificial Sequence
  Description of Artificial Sequence: Synthetic oligonucleotide
ctactgttgttagacgacga

SEQ ID NO: 1703 - DNA, 21 bp, Artificial Sequence
  Description of Artificial Sequence: Synthetic oligonucleotide
ctactgttgttagacgacgag

SEQ ID NO: 1704 - DNA, 20 bp, Artificial Sequence
  Description of Artificial Sequence: Synthetic oligonucleotide
ctagaagatctcgtactgaa

SEQ ID NO: 1705 - DNA, 20 bp, Artificial Sequence
  Description of Artificial Sequence: Synthetic oligonucleotide
ctagactctgcggtattgtg

SEQ ID NO: 1706 - DNA, 20 bp, Artificial Sequence
  Description of Artificial Sequence: Synthetic oligonucleotide
ctagagtcattagttccccc

SEQ ID NO: 1707 - DNA, 20 bp, Artificial Sequence
  Description of Artificial Sequence: Synthetic oligonucleotide
ctagcaggcataatcaattg

SEQ ID NO: 1708 - DNA, 20 bp, Artificial Sequence
  Description of Artificial Sequence: Synthetic oligonucleotide
ctagctacctgggtgggtgt

SEQ ID NO: 1709 - DNA, 21 bp, Artificial Sequence
  Description of Artificial Sequence: Synthetic oligonucleotide
ctaggttttatccaaaggtta

SEQ ID NO: 1710 - DNA, 20 bp, Artificial Sequence
  Description of Artificial Sequence: Synthetic oligonucleotide
ctagtaaactgagccaggag

SEQ ID NO: 1711 - DNA, 21 bp, Artificial Sequence
  Description of Artificial Sequence: Synthetic oligonucleotide
ctagtagtcagttatgtcaac

SEQ ID NO: 1712 - DNA, 20 bp, Artificial Sequence
  Description of Artificial Sequence: Synthetic oligonucleotide
ctataacggtttctcttcca

SEQ ID NO: 1713 - DNA, 20 bp, Artificial Sequence
  Description of Artificial Sequence: Synthetic oligonucleotide
ctatcctatcaacacttccg

SEQ ID NO: 1714 - DNA, 21 bp, Artificial Sequence
  Description of Artificial Sequence: Synthetic oligonucleotide
ctatgtgttgtttctctctta

SEQ ID NO: 1715 - DNA, 20 bp, Artificial Sequence
  Description of Artificial Sequence: Synthetic oligonucleotide
ctattaacaggcctattgat

SEQ ID NO: 1716 - DNA, 20 bp, Artificial Sequence
  Description of Artificial Sequence: Synthetic oligonucleotide
ctattgattggaaagtatgt

SEQ ID NO: 1717 - DNA, 20 bp, Artificial Sequence
  Description of Artificial Sequence: Synthetic oligonucleotide
ctatttacacactctatgga

SEQ ID NO: 1718 - DNA, 20 bp, Artificial Sequence
  Description of Artificial Sequence: Synthetic oligonucleotide
ctcaagatgctgtacagact

SEQ ID NO: 1719 - DNA, 20 bp, Artificial Sequence
  Description of Artificial Sequence: Synthetic oligonucleotide
ctcaccatactgcactcagg

SEQ ID NO: 1720 - DNA, 20 bp, Artificial Sequence
  Description of Artificial Sequence: Synthetic oligonucleotide
ctcaggctcagggcatacta

SEQ ID NO: 1721 - DNA, 20 bp, Artificial Sequence
  Description of Artificial Sequence: Synthetic oligonucleotide
ctcatcctcaggccatgcag

SEQ ID NO: 1722 - DNA, 20 bp, Artificial Sequence
  Description of Artificial Sequence: Synthetic oligonucleotide
ctccaacttgtcctggttat

SEQ ID NO: 1723 - DNA, 20 bp, Artificial Sequence
  Description of Artificial Sequence: Synthetic oligonucleotide
ctccagacctgctgcgagca

SEQ ID NO: 1724 - DNA, 21 bp, Artificial Sequence
  Description of Artificial Sequence: Synthetic oligonucleotide
ctccatgttcagcgcagggtc

SEQ ID NO: 1725 - DNA, 20 bp, Artificial Sequence
  Description of Artificial Sequence: Synthetic oligonucleotide
ctccctcgcctcgcagacga

SEQ ID NO: 1726 - DNA, 20 bp, Artificial Sequence
  Description of Artificial Sequence: Synthetic oligonucleotide
ctcctaccttgttggcgtct

SEQ ID NO: 1727 - DNA, 20 bp, Artificial Sequence
  Description of Artificial Sequence: Synthetic oligonucleotide
ctcctgcctccaccaatcgc

SEQ ID NO: 1728 - DNA, 20 bp, Artificial Sequence
  Description of Artificial Sequence: Synthetic oligonucleotide
ctcctggctcagtttactag

SEQ ID NO: 1729 - DNA, 20 bp, Artificial Sequence
  Description of Artificial Sequence: Synthetic oligonucleotide
ctcgagaagattgacgataa

SEQ ID NO: 1730 - DNA, 20 bp, Artificial Sequence
  Description of Artificial Sequence: Synthetic oligonucleotide
ctcgaggattggggaccctg

SEQ ID NO: 1731 - DNA, 20 bp, Artificial Sequence
  Description of Artificial Sequence: Synthetic oligonucleotide
ctctaaggcttcccgataca

SEQ ID NO: 1732 - DNA, 20 bp, Artificial Sequence
  Description of Artificial Sequence: Synthetic oligonucleotide
ctctagatgctggatcttcc

SEQ ID NO: 1733 - DNA, 20 bp, Artificial Sequence
  Description of Artificial Sequence: Synthetic oligonucleotide
ctctataacggtttctcttc

SEQ ID NO: 1734 - DNA, 21 bp, Artificial Sequence
  Description of Artificial Sequence: Synthetic oligonucleotide
ctctataacggtttctcttcc

SEQ ID NO: 1735 - DNA, 20 bp, Artificial Sequence
  Description of Artificial Sequence: Synthetic oligonucleotide
ctctcactctgggatcttgc

SEQ ID NO: 1736 - DNA, 20 bp, Artificial Sequence
  Description of Artificial Sequence: Synthetic oligonucleotide
ctctctgcaatgtcaacgac

SEQ ID NO: 1737 - DNA, 20 bp, Artificial Sequence
  Description of Artificial Sequence: Synthetic oligonucleotide
ctctgaaggctggatccaac

SEQ ID NO: 1738 - DNA, 21 bp, Artificial Sequence
  Description of Artificial Sequence: Synthetic oligonucleotide
ctctgaaggctggatccaact

SEQ ID NO: 1739 - DNA, 20 bp, Artificial Sequence
  Description of Artificial Sequence: Synthetic oligonucleotide
ctctgggatcttgcagagtt

SEQ ID NO: 1740 - DNA, 21 bp, Artificial Sequence
  Description of Artificial Sequence: Synthetic oligonucleotide
ctctgggattctttcccgacc

SEQ ID NO: 1741 - DNA, 20 bp, Artificial Sequence
  Description of Artificial Sequence: Synthetic oligonucleotide
ctctgtatcgggaagcctta

SEQ ID NO: 1742 - DNA, 20 bp, Artificial Sequence
  Description of Artificial Sequence: Synthetic oligonucleotide
ctcttatgtaagaccttggg

SEQ ID NO: 1743 - DNA, 20 bp, Artificial Sequence
  Description of Artificial Sequence: Synthetic oligonucleotide
ctcttccaaaagtgagacaa

SEQ ID NO: 1744 - DNA, 20 bp, Artificial Sequence
  Description of Artificial Sequence: Synthetic oligonucleotide
ctctttgttttgttagggtt

SEQ ID NO: 1745 - DNA, 20 bp, Artificial Sequence
  Description of Artificial Sequence: Synthetic oligonucleotide
ctgaactggagccaccagca

SEQ ID NO: 1746 - DNA, 20 bp, Artificial Sequence
  Description of Artificial Sequence: Synthetic oligonucleotide
ctgaaggaaagaagtcagaa

SEQ ID NO: 1747 - DNA, 20 bp, Artificial Sequence
  Description of Artificial Sequence: Synthetic oligonucleotide
ctgactactaggtctctaga

SEQ ID NO: 1748 - DNA, 20 bp, Artificial Sequence
  Description of Artificial Sequence: Synthetic oligonucleotide
ctgacttctttccttcagta

SEQ ID NO: 1749 - DNA, 20 bp, Artificial Sequence
  Description of Artificial Sequence: Synthetic oligonucleotide
ctgaggatgagtgtttctca

SEQ ID NO: 1750 - DNA, 20 bp, Artificial Sequence
  Description of Artificial Sequence: Synthetic oligonucleotide
ctgagggctccaccccaaaa

SEQ ID NO: 1751 - DNA, 20 bp, Artificial Sequence
  Description of Artificial Sequence: Synthetic oligonucleotide
ctgagtgcagtatggtgagg

SEQ ID NO: 1752 - DNA, 20 bp, Artificial Sequence
  Description of Artificial Sequence: Synthetic oligonucleotide
ctgcatgactactgctcaag

SEQ ID NO: 1753 - DNA, 20 bp, Artificial Sequence
  Description of Artificial Sequence: Synthetic oligonucleotide
ctgccggaccgtgtgcactt

SEQ ID NO: 1754 - DNA, 20 bp, Artificial Sequence
  Description of Artificial Sequence: Synthetic oligonucleotide
ctgccgttccgaccgaccac

SEQ ID NO: 1755 - DNA, 20 bp, Artificial Sequence
  Description of Artificial Sequence: Synthetic oligonucleotide
ctgcctccaccaatcgccag

SEQ ID NO: 1756 - DNA, 20 bp, Artificial Sequence
  Description of Artificial Sequence: Synthetic oligonucleotide
ctgccttcctgtctggcgat

SEQ ID NO: 1757 - DNA, 21 bp, Artificial Sequence
  Description of Artificial Sequence: Synthetic oligonucleotide
ctgcgaattttggccaagaca

SEQ ID NO: 1758 - DNA, 20 bp, Artificial Sequence
  Description of Artificial Sequence: Synthetic oligonucleotide
ctgctgcgagcaaaacaagc

SEQ ID NO: 1759 - DNA, 20 bp, Artificial Sequence
  Description of Artificial Sequence: Synthetic oligonucleotide
ctgctggtggctccagttca

SEQ ID NO: 1760 - DNA, 20 bp, Artificial Sequence
  Description of Artificial Sequence: Synthetic oligonucleotide
ctggaattagaggacaaacg

SEQ ID NO: 1761 - DNA, 20 bp, Artificial Sequence
  Description of Artificial Sequence: Synthetic oligonucleotide
ctggatccaactggtggtcg

SEQ ID NO: 1762 - DNA, 20 bp, Artificial Sequence
  Description of Artificial Sequence: Synthetic oligonucleotide
ctggccagacgccaacaagg

SEQ ID NO: 1763 - DNA, 20 bp, Artificial Sequence
  Description of Artificial Sequence: Synthetic oligonucleotide
ctggccgttgccgggcaacg

SEQ ID NO: 1764 - DNA, 20 bp, Artificial Sequence
  Description of Artificial Sequence: Synthetic oligonucleotide
ctggcgattggtggaggcag

SEQ ID NO: 1765 - DNA, 20 bp, Artificial Sequence
  Description of Artificial Sequence: Synthetic oligonucleotide
ctggctggggcttggtcatg

SEQ ID NO: 1766 - DNA, 20 bp, Artificial Sequence
  Description of Artificial Sequence: Synthetic oligonucleotide
ctgggaggagttgggggagg

SEQ ID NO: 1767 - DNA, 20 bp, Artificial Sequence
  Description of Artificial Sequence: Synthetic oligonucleotide
ctggggggaactaatgactc

SEQ ID NO: 1768 - DNA, 20 bp, Artificial Sequence
  Description of Artificial Sequence: Synthetic oligonucleotide
ctgggtgggtgttaatttgg

SEQ ID NO: 1769 - DNA, 20 bp, Artificial Sequence
  Description of Artificial Sequence: Synthetic oligonucleotide
ctgggtttcaccccaccgca

SEQ ID NO: 1770 - DNA, 20 bp, Artificial Sequence
  Description of Artificial Sequence: Synthetic oligonucleotide
ctggtgcgcagaccaattta

SEQ ID NO: 1771 - DNA, 20 bp, Artificial Sequence
  Description of Artificial Sequence: Synthetic oligonucleotide
ctgtaacacgagaaggggtc

SEQ ID NO: 1772 - DNA, 20 bp, Artificial Sequence
  Description of Artificial Sequence: Synthetic oligonucleotide
ctgtacagacttggccccca

SEQ ID NO: 1773 - DNA, 21 bp, Artificial Sequence
  Description of Artificial Sequence: Synthetic oligonucleotide
ctgtatttccctgctggtggc

SEQ ID NO: 1774 - DNA, 20 bp, Artificial Sequence
  Description of Artificial Sequence: Synthetic oligonucleotide
ctgtctggcgattggtggag

SEQ ID NO: 1775 - DNA, 20 bp, Artificial Sequence
  Description of Artificial Sequence: Synthetic oligonucleotide
ctgtctttaatcctcattgg

SEQ ID NO: 1776 - DNA, 20 bp, Artificial Sequence
  Description of Artificial Sequence: Synthetic oligonucleotide
ctgtgctgccaactggatcc

SEQ ID NO: 1777 - DNA, 20 bp, Artificial Sequence
  Description of Artificial Sequence: Synthetic oligonucleotide
ctgtgtttgctctgaaggct

SEQ ID NO: 1778 - DNA, 20 bp, Artificial Sequence
  Description of Artificial Sequence: Synthetic oligonucleotide
ctgttaataggaagttttct

SEQ ID NO: 1779 - DNA, 20 bp, Artificial Sequence
  Description of Artificial Sequence: Synthetic oligonucleotide
ctgttgctgtaccaaacctt

SEQ ID NO: 1780 - DNA, 20 bp, Artificial Sequence
  Description of Artificial Sequence: Synthetic oligonucleotide
ctgttgttagacgacgaggc

SEQ ID NO: 1781 - DNA, 20 bp, Artificial Sequence
  Description of Artificial Sequence: Synthetic oligonucleotide
ctgtttggctttcagttata

SEQ ID NO: 1782 - DNA, 20 bp, Artificial Sequence
  Description of Artificial Sequence: Synthetic oligonucleotide
ctgtttgtttaaagactggg

SEQ ID NO: 1783 - DNA, 20 bp, Artificial Sequence
  Description of Artificial Sequence: Synthetic oligonucleotide
cttacaaggcctttctgtgt

SEQ ID NO: 1784 - DNA, 21 bp, Artificial Sequence
  Description of Artificial Sequence: Synthetic oligonucleotide
cttacaaggcctttctgtgta

SEQ ID NO: 1785 - DNA, 20 bp, Artificial Sequence
  Description of Artificial Sequence: Synthetic oligonucleotide
cttacagttaatgagaaaag

SEQ ID NO: 1786 - DNA, 20 bp, Artificial Sequence
  Description of Artificial Sequence: Synthetic oligonucleotide
cttatccaatggtaaatatt

SEQ ID NO: 1787 - DNA, 20 bp, Artificial Sequence
  Description of Artificial Sequence: Synthetic oligonucleotide
cttatcgtcaatcttctcga

SEQ ID NO: 1788 - DNA, 20 bp, Artificial Sequence
  Description of Artificial Sequence: Synthetic oligonucleotide
cttatgagtccaaggaatac

SEQ ID NO: 1789 - DNA, 20 bp, Artificial Sequence
  Description of Artificial Sequence: Synthetic oligonucleotide
cttcaaagactgtttgttta

SEQ ID NO: 1790 - DNA, 20 bp, Artificial Sequence
  Description of Artificial Sequence: Synthetic oligonucleotide
cttcacctctgcacgtcgca

SEQ ID NO: 1791 - DNA, 20 bp, Artificial Sequence
  Description of Artificial Sequence: Synthetic oligonucleotide
cttccaaattaacacccacc

SEQ ID NO: 1792 - DNA, 20 bp, Artificial Sequence
  Description of Artificial Sequence: Synthetic oligonucleotide
cttccaatgacataacccat

SEQ ID NO: 1793 - DNA, 20 bp, Artificial Sequence
  Description of Artificial Sequence: Synthetic oligonucleotide
cttccggaaactactgttgt

SEQ ID NO: 1794 - DNA, 20 bp, Artificial Sequence
  Description of Artificial Sequence: Synthetic oligonucleotide
cttcctattaacaggcctat

SEQ ID NO: 1795 - DNA, 20 bp, Artificial Sequence
  Description of Artificial Sequence: Synthetic oligonucleotide
cttcctgtctggcgattggt

SEQ ID NO: 1796 - DNA, 20 bp, Artificial Sequence
  Description of Artificial Sequence: Synthetic oligonucleotide
cttcttttctcattaactgt

SEQ ID NO: 1797 - DNA, 20 bp, Artificial Sequence
  Description of Artificial Sequence: Synthetic oligonucleotide
cttgaacagtaggacatgaa

SEQ ID NO: 1798 - DNA, 20 bp, Artificial Sequence
  Description of Artificial Sequence: Synthetic oligonucleotide
cttgcctgagtgcagtatgg

SEQ ID NO: 1799 - DNA, 20 bp, Artificial Sequence
  Description of Artificial Sequence: Synthetic oligonucleotide
cttggcacagacctggccgt

SEQ ID NO: 1800 - DNA, 20 bp, Artificial Sequence
  Description of Artificial Sequence: Synthetic oligonucleotide
cttgggtggctttggggcat

SEQ ID NO: 1801 - DNA, 20 bp, Artificial Sequence
  Description of Artificial Sequence: Synthetic oligonucleotide
cttggtgtaaatgtatatta

SEQ ID NO: 1802 - DNA, 20 bp, Artificial Sequence
  Description of Artificial Sequence: Synthetic oligonucleotide
cttgtctcacttttggaaga

SEQ ID NO: 1803 - DNA, 20 bp, Artificial Sequence
  Description of Artificial Sequence: Synthetic oligonucleotide
cttgttcatgtcctactgtt

SEQ ID NO: 1804 - DNA, 20 bp, Artificial Sequence
  Description of Artificial Sequence: Synthetic oligonucleotide
ctttaaacaaacagtctttg

SEQ ID NO: 1805 - DNA, 20 bp, Artificial Sequence
  Description of Artificial Sequence: Synthetic oligonucleotide
ctttaggcccatattagtgt

SEQ ID NO: 1806 - DNA, 20 bp, Artificial Sequence
  Description of Artificial Sequence: Synthetic oligonucleotide
ctttccaccagcaatcctct

SEQ ID NO: 1807 - DNA, 20 bp, Artificial Sequence
  Description of Artificial Sequence: Synthetic oligonucleotide
ctttcggaaaattcctatgg

SEQ ID NO: 1808 - DNA, 20 bp, Artificial Sequence
  Description of Artificial Sequence: Synthetic oligonucleotide
ctttctgtgtaaacaatacc

SEQ ID NO: 1809 - DNA, 20 bp, Artificial Sequence
  Description of Artificial Sequence: Synthetic oligonucleotide
ctttgagaaacactcatcct

SEQ ID NO: 1810 - DNA, 21 bp, Artificial Sequence
  Description of Artificial Sequence: Synthetic oligonucleotide
ctttggataaaacctagcagg

SEQ ID NO: 1811 - DNA, 20 bp, Artificial Sequence
  Description of Artificial Sequence: Synthetic oligonucleotide
ctttgtactaggaggctgta

SEQ ID NO: 1812 - DNA, 20 bp, Artificial Sequence
  Description of Artificial Sequence: Synthetic oligonucleotide
ctttgtttacgtcccgtcgg

SEQ ID NO: 1813 - DNA, 20 bp, Artificial Sequence
  Description of Artificial Sequence: Synthetic oligonucleotide
cttttctcattaactgtaag

SEQ ID NO: 1814 - DNA, 21 bp, Artificial Sequence
  Description of Artificial Sequence: Synthetic oligonucleotide
cttttggaagagaaaccgtta

SEQ ID NO: 1815 - DNA, 20 bp, Artificial Sequence
  Description of Artificial Sequence: Synthetic oligonucleotide
cttttggggtggagccctca

SEQ ID NO: 1816 - DNA, 20 bp, Artificial Sequence
  Description of Artificial Sequence: Synthetic oligonucleotide
gaaaagatggtgttttccaa

SEQ ID NO: 1817 - DNA, 21 bp, Artificial Sequence
  Description of Artificial Sequence: Synthetic oligonucleotide
gaaaagatggtgttttccaat

SEQ ID NO: 1818 - DNA, 21 bp, Artificial Sequence
  Description of Artificial Sequence: Synthetic oligonucleotide
gaaacactcatcctcaggcca

SEQ ID NO: 1819 - DNA, 20 bp, Artificial Sequence
  Description of Artificial Sequence: Synthetic oligonucleotide
gaaacccagcccgaatgctc

SEQ ID NO: 1820 - DNA, 20 bp, Artificial Sequence
  Description of Artificial Sequence: Synthetic oligonucleotide
gaaagacaccaaatactcta

SEQ ID NO: 1821 - DNA, 21 bp, Artificial Sequence
  Description of Artificial Sequence: Synthetic oligonucleotide
gaaagacaccaaatactctat

SEQ ID NO: 1822 - DNA, 20 bp, Artificial Sequence
  Description of Artificial Sequence: Synthetic oligonucleotide
gaaaggccttgtaagttggc

SEQ ID NO: 1823 - DNA, 20 bp, Artificial Sequence
  Description of Artificial Sequence: Synthetic oligonucleotide
gaaagtatgtcaacgaattg

SEQ ID NO: 1824 - DNA, 21 bp, Artificial Sequence
  Description of Artificial Sequence: Synthetic oligonucleotide
gaaagtgaaagcctgcttaga

SEQ ID NO: 1825 - DNA, 20 bp, Artificial Sequence
  Description of Artificial Sequence: Synthetic oligonucleotide
gaaatacaggcctctcactc

SEQ ID NO: 1826 - DNA, 20 bp, Artificial Sequence
  Description of Artificial Sequence: Synthetic oligonucleotide
gaacaagagatgattaggca

SEQ ID NO: 1827 - DNA, 20 bp, Artificial Sequence
  Description of Artificial Sequence: Synthetic oligonucleotide
gaacaatgctcaggagactc

SEQ ID NO: 1828 - DNA, 20 bp, Artificial Sequence
  Description of Artificial Sequence: Synthetic oligonucleotide
gaacacatcatacaaaaaat

SEQ ID NO: 1829 - DNA, 20 bp, Artificial Sequence
  Description of Artificial Sequence: Synthetic oligonucleotide
gaacagggtttactgctcct

SEQ ID NO: 1830 - DNA, 20 bp, Artificial Sequence
  Description of Artificial Sequence: Synthetic oligonucleotide
gaacagtaggacatgaacaa

SEQ ID NO: 1831 - DNA, 20 bp, Artificial Sequence
  Description of Artificial Sequence: Synthetic oligonucleotide
gaacctgcatgactactgct

SEQ ID NO: 1832 - DNA, 20 bp, Artificial Sequence
  Description of Artificial Sequence: Synthetic oligonucleotide
gaacctttaccccgttgccc

SEQ ID NO: 1833 - DNA, 21 bp, Artificial Sequence
  Description of Artificial Sequence: Synthetic oligonucleotide
gaacgcccaccgaatgttgcc

SEQ ID NO: 1834 - DNA, 20 bp, Artificial Sequence
  Description of Artificial Sequence: Synthetic oligonucleotide
gaactaccgtgtgtcttggc

SEQ ID NO: 1835 - DNA, 20 bp, Artificial Sequence
  Description of Artificial Sequence: Synthetic oligonucleotide
gaactccctcgcctcgcaga

SEQ ID NO: 1836 - DNA, 20 bp, Artificial Sequence
  Description of Artificial Sequence: Synthetic oligonucleotide
gaagaaccaacaagaagatg

SEQ ID NO: 1837 - DNA, 20 bp, Artificial Sequence
  Description of Artificial Sequence: Synthetic oligonucleotide
gaagatctcgtactgaagga

SEQ ID NO: 1838 - DNA, 21 bp, Artificial Sequence
  Description of Artificial Sequence: Synthetic oligonucleotide
gaagatctcgtactgaaggaa

SEQ ID NO: 1839 - DNA, 20 bp, Artificial Sequence
  Description of Artificial Sequence: Synthetic oligonucleotide
gaagattgacgataagggag

SEQ ID NO: 1840 - DNA, 21 bp, Artificial Sequence
  Description of Artificial Sequence: Synthetic oligonucleotide
gaagattgacgataagggaga

SEQ ID NO: 1841 - DNA, 20 bp, Artificial Sequence
  Description of Artificial Sequence: Synthetic oligonucleotide
gaagcgaagtgcacacggtc

SEQ ID NO: 1842 - DNA, 20 bp, Artificial Sequence
  Description of Artificial Sequence: Synthetic oligonucleotide
gaaggcacagacggggagtc

SEQ ID NO: 1843 - DNA, 20 bp, Artificial Sequence
  Description of Artificial Sequence: Synthetic oligonucleotide
gaaggcgggtatattatata

SEQ ID NO: 1844 - DNA, 20 bp, Artificial Sequence
  Description of Artificial Sequence: Synthetic oligonucleotide
gaaggggacgagagagtccc

SEQ ID NO: 1845 - DNA, 20 bp, Artificial Sequence
  Description of Artificial Sequence: Synthetic oligonucleotide
gaagggtcgtccgcaggatt

SEQ ID NO: 1846 - DNA, 20 bp, Artificial Sequence
  Description of Artificial Sequence: Synthetic oligonucleotide
gaaggtctcaatcgccgcgt

SEQ ID NO: 1847 - DNA, 20 bp, Artificial Sequence
  Description of Artificial Sequence: Synthetic oligonucleotide
gaaggtttggtacagcaaca

SEQ ID NO: 1848 - DNA, 20 bp, Artificial Sequence
  Description of Artificial Sequence: Synthetic oligonucleotide
gaagttatgggtccttgcca

SEQ ID NO: 1849 - DNA, 21 bp, Artificial Sequence
  Description of Artificial Sequence: Synthetic oligonucleotide
gaatactaacattgaggttcc

SEQ ID NO: 1850 - DNA, 20 bp, Artificial Sequence
  Description of Artificial Sequence: Synthetic oligonucleotide
gaatatggtgacccacaaaa

SEQ ID NO: 1851 - DNA, 20 bp, Artificial Sequence
  Description of Artificial Sequence: Synthetic oligonucleotide
gaatcccagaggattgctgg

SEQ ID NO: 1852 - DNA, 21 bp, Artificial Sequence
  Description of Artificial Sequence: Synthetic oligonucleotide
gaattgcttgcctgagtgcag

SEQ ID NO: 1853 - DNA, 20 bp, Artificial Sequence
  Description of Artificial Sequence: Synthetic oligonucleotide
gacaacagagttatcagtcc

SEQ ID NO: 1854 - DNA, 21 bp, Artificial Sequence
  Description of Artificial Sequence: Synthetic oligonucleotide
gacaacagagttatcagtccc

SEQ ID NO: 1855 - DNA, 20 bp, Artificial Sequence
  Description of Artificial Sequence: Synthetic oligonucleotide
gacaagaaatgtgaaaccac

SEQ ID NO: 1856 - DNA, 20 bp, Artificial Sequence
  Description of Artificial Sequence: Synthetic oligonucleotide
gacacacggtagttccccct

SEQ ID NO: 1857 - DNA, 21 bp, Artificial Sequence
  Description of Artificial Sequence: Synthetic oligonucleotide
gacacacggtagttcccccta

SEQ ID NO: 1858 - DNA, 20 bp, Artificial Sequence
  Description of Artificial Sequence: Synthetic oligonucleotide
gacacctggccagacgccaa

SEQ ID NO: 1859 - DNA, 20 bp, Artificial Sequence
  Description of Artificial Sequence: Synthetic oligonucleotide
gacactatttacacactcta

SEQ ID NO: 1860 - DNA, 20 bp, Artificial Sequence
  Description of Artificial Sequence: Synthetic oligonucleotide
gacaggaaggcagcctaccc

SEQ ID NO: 1861 - DNA, 20 bp, Artificial Sequence
  Description of Artificial Sequence: Synthetic oligonucleotide
gacaggtacagtagaagaat

SEQ ID NO: 1862 - DNA, 20 bp, Artificial Sequence
  Description of Artificial Sequence: Synthetic oligonucleotide
gacataacccataaaattca

SEQ ID NO: 1863 - DNA, 20 bp, Artificial Sequence
  Description of Artificial Sequence: Synthetic oligonucleotide
gacatactttccaatcaata

SEQ ID NO: 1864 - DNA, 20 bp, Artificial Sequence
  Description of Artificial Sequence: Synthetic oligonucleotide
gacatgaacaagagatgatt

SEQ ID NO: 1865 - DNA, 20 bp, Artificial Sequence
  Description of Artificial Sequence: Synthetic oligonucleotide
gaccaagccccagccagtgg

SEQ ID NO: 1866 - DNA, 20 bp, Artificial Sequence
  Description of Artificial Sequence: Synthetic oligonucleotide
gaccaccgtgaacgcccacc

SEQ ID NO: 1867 - DNA, 20 bp, Artificial Sequence
  Description of Artificial Sequence: Synthetic oligonucleotide
gaccccgagaagggtcgtcc

SEQ ID NO: 1868 - DNA, 21 bp, Artificial Sequence
  Description of Artificial Sequence: Synthetic oligonucleotide
gaccccgagaagggtcgtccg

SEQ ID NO: 1869 - DNA, 21 bp, Artificial Sequence
  Description of Artificial Sequence: Synthetic oligonucleotide
gaccccttctcgtgttacagg

SEQ ID NO: 1870 - DNA, 20 bp, Artificial Sequence
  Description of Artificial Sequence: Synthetic oligonucleotide
gaccctgcgctgaacatgga

SEQ ID NO: 1871 - DNA, 20 bp, Artificial Sequence
  Description of Artificial Sequence: Synthetic oligonucleotide
gacccttataaagaatttgg

SEQ ID NO: 1872 - DNA, 20 bp, Artificial Sequence
  Description of Artificial Sequence: Synthetic oligonucleotide
gacccttctcggggtcgctt

SEQ ID NO: 1873 - DNA, 20 bp, Artificial Sequence
  Description of Artificial Sequence: Synthetic oligonucleotide
gacctagtagtcagttatgt

SEQ ID NO: 1874 - DNA, 20 bp, Artificial Sequence
  Description of Artificial Sequence: Synthetic oligonucleotide
gacctgctgcgagcaaaaca

SEQ ID NO: 1875 - DNA, 21 bp, Artificial Sequence
  Description of Artificial Sequence: Synthetic oligonucleotide
gacctggccgttgccgggcaa

SEQ ID NO: 1876 - DNA, 20 bp, Artificial Sequence
  Description of Artificial Sequence: Synthetic oligonucleotide
gaccttcgtctgcgaggcga

SEQ ID NO: 1877 - DNA, 20 bp, Artificial Sequence
  Description of Artificial Sequence: Synthetic oligonucleotide
gaccttgaggcatacttcaa

SEQ ID NO: 1878 - DNA, 20 bp, Artificial Sequence
  Description of Artificial Sequence: Synthetic oligonucleotide
gaccttgggcaacattcggt

SEQ ID NO: 1879 - DNA, 20 bp, Artificial Sequence
  Description of Artificial Sequence: Synthetic oligonucleotide
gacggggagtccgcgtaaag

SEQ ID NO: 1880 - DNA, 21 bp, Artificial Sequence
  Description of Artificial Sequence: Synthetic oligonucleotide
gactactgcctctcccttatc

SEQ ID NO: 1881 - DNA, 20 bp, Artificial Sequence
  Description of Artificial Sequence: Synthetic oligonucleotide
gactctaaggcttcccgata

SEQ ID NO: 1882 - DNA, 20 bp, Artificial Sequence
  Description of Artificial Sequence: Synthetic oligonucleotide
gactgggaggagttggggga

SEQ ID NO: 1883 - DNA, 20 bp, Artificial Sequence
  Description of Artificial Sequence: Synthetic oligonucleotide
gactgtttgtttaaagactg

SEQ ID NO: 1884 - DNA, 20 bp, Artificial Sequence
  Description of Artificial Sequence: Synthetic oligonucleotide
gacttctttccttcagtacg

SEQ ID NO: 1885 - DNA, 20 bp, Artificial Sequence
  Description of Artificial Sequence: Synthetic oligonucleotide
gagaaagtgaaagcctgctt

SEQ ID NO: 1886 - DNA, 20 bp, Artificial Sequence
  Description of Artificial Sequence: Synthetic oligonucleotide
gagaagattgacgataaggg

SEQ ID NO: 1887 - DNA, 20 bp, Artificial Sequence
  Description of Artificial Sequence: Synthetic oligonucleotide
gagaccttcgtctgcgaggc

SEQ ID NO: 1888 - DNA, 20 bp, Artificial Sequence
  Description of Artificial Sequence: Synthetic oligonucleotide
gagagagtcccaagcgaccc

SEQ ID NO: 1889 - DNA, 20 bp, Artificial Sequence
  Description of Artificial Sequence: Synthetic oligonucleotide
gagaggcagtagtcggaaca

SEQ ID NO: 1890 - DNA, 20 bp, Artificial Sequence
  Description of Artificial Sequence: Synthetic oligonucleotide
gagagtcccaagcgaccccg

SEQ ID NO: 1891 - DNA, 20 bp, Artificial Sequence
  Description of Artificial Sequence: Synthetic oligonucleotide
gagatgattaggcagaggtg

SEQ ID NO: 1892 - DNA, 21 bp, Artificial Sequence
  Description of Artificial Sequence: Synthetic oligonucleotide
gagatgattaggcagaggtga

SEQ ID NO: 1893 - DNA, 20 bp, Artificial Sequence
  Description of Artificial Sequence: Synthetic oligonucleotide
gagattgagatcttctgcga

SEQ ID NO: 1894 - DNA, 20 bp, Artificial Sequence
  Description of Artificial Sequence: Synthetic oligonucleotide
gagcagtagtcatgcaggtt

SEQ ID NO: 1895 - DNA, 20 bp, Artificial Sequence
  Description of Artificial Sequence: Synthetic oligonucleotide
gagctgaggcggtatctaga

SEQ ID NO: 1896 - DNA, 21 bp, Artificial Sequence
  Description of Artificial Sequence: Synthetic oligonucleotide
gaggacaacagagttatcagt

SEQ ID NO: 1897 - DNA, 20 bp, Artificial Sequence
  Description of Artificial Sequence: Synthetic oligonucleotide
gaggactcttggactctctg

SEQ ID NO: 1898 - DNA, 20 bp, Artificial Sequence
  Description of Artificial Sequence: Synthetic oligonucleotide
gaggagccgaaaaggttcca

SEQ ID NO: 1899 - DNA, 20 bp, Artificial Sequence
  Description of Artificial Sequence: Synthetic oligonucleotide
gaggagttgggggaggagat

SEQ ID NO: 1900 - DNA, 20 bp, Artificial Sequence
  Description of Artificial Sequence: Synthetic oligonucleotide
gaggattcttgtcaacaaga

SEQ ID NO: 1901 - DNA, 20 bp, Artificial Sequence
  Description of Artificial Sequence: Synthetic oligonucleotide
gaggattggggaccctgcgc

SEQ ID NO: 1902 - DNA, 20 bp, Artificial Sequence
  Description of Artificial Sequence: Synthetic oligonucleotide
gaggcaggaggcggatttgc

SEQ ID NO: 1903 - DNA, 20 bp, Artificial Sequence
  Description of Artificial Sequence: Synthetic oligonucleotide
gaggcttgaacagtaggaca

SEQ ID NO: 1904 - DNA, 20 bp, Artificial Sequence
  Description of Artificial Sequence: Synthetic oligonucleotide
gagggagttcttcttctagg

SEQ ID NO: 1905 - DNA, 20 bp, Artificial Sequence
  Description of Artificial Sequence: Synthetic oligonucleotide
gagtcattagttccccccag

SEQ ID NO: 1906 - DNA, 20 bp, Artificial Sequence
  Description of Artificial Sequence: Synthetic oligonucleotide
gagtcccaagcgaccccgag

SEQ ID NO: 1907 - DNA, 21 bp, Artificial Sequence
  Description of Artificial Sequence: Synthetic oligonucleotide
gagtccctttttaccgctgtt

SEQ ID NO: 1908 - DNA, 20 bp, Artificial Sequence
  Description of Artificial Sequence: Synthetic oligonucleotide
gagtgcgaatccacactccg

SEQ ID NO: 1909 - DNA, 20 bp, Artificial Sequence
  Description of Artificial Sequence: Synthetic oligonucleotide
gagtttggtgaaaggttgtg

SEQ ID NO: 1910 - DNA, 20 bp, Artificial Sequence
  Description of Artificial Sequence: Synthetic oligonucleotide
gataaccacattgtgtaaat

SEQ ID NO: 1911 - DNA, 20 bp, Artificial Sequence
  Description of Artificial Sequence: Synthetic oligonucleotide
gataagggagaggcagtagt

SEQ ID NO: 1912 - DNA, 20 bp, Artificial Sequence
  Description of Artificial Sequence: Synthetic oligonucleotide
gataatgtttgctccagacc

SEQ ID NO: 1913 - DNA, 20 bp, Artificial Sequence
  Description of Artificial Sequence: Synthetic oligonucleotide
gatacgatgtatatttgcgg

SEQ ID NO: 1914 - DNA, 20 bp, Artificial Sequence
  Description of Artificial Sequence: Synthetic oligonucleotide
gataggataggggcatttgg

SEQ ID NO: 1915 - DNA, 20 bp, Artificial Sequence
  Description of Artificial Sequence: Synthetic oligonucleotide
gatagtccagaagaaccaac

SEQ ID NO: 1916 - DNA, 20 bp, Artificial Sequence
  Description of Artificial Sequence: Synthetic oligonucleotide
gatccaactggtggtcggga

SEQ ID NO: 1917 - DNA, 20 bp, Artificial Sequence
  Description of Artificial Sequence: Synthetic oligonucleotide
gatcctcaaccaccagcacg

SEQ ID NO: 1918 - DNA, 20 bp, Artificial Sequence
  Description of Artificial Sequence: Synthetic oligonucleotide
gatcggcagaggagccgaaa

SEQ ID NO: 1919 - DNA, 20 bp, Artificial Sequence
  Description of Artificial Sequence: Synthetic oligonucleotide
gatctcgtactgaaggaaag

SEQ ID NO: 1920 - DNA, 20 bp, Artificial Sequence
  Description of Artificial Sequence: Synthetic oligonucleotide
gatcttctagataccgcctc

SEQ ID NO: 1921 - DNA, 20 bp, Artificial Sequence
  Description of Artificial Sequence: Synthetic oligonucleotide
gatcttgcagagtttggtga

SEQ ID NO: 1922 - DNA, 20 bp, Artificial Sequence
  Description of Artificial Sequence: Synthetic oligonucleotide
gatgagtgtttctcaaaggt

SEQ ID NO: 1923 - DNA, 20 bp, Artificial Sequence
  Description of Artificial Sequence: Synthetic oligonucleotide
gatgattaggcagaggtgaa

SEQ ID NO: 1924 - DNA, 20 bp, Artificial Sequence
  Description of Artificial Sequence: Synthetic oligonucleotide
gatggcccatgaccaagccc

SEQ ID NO: 1925 - DNA, 20 bp, Artificial Sequence
  Description of Artificial Sequence: Synthetic oligonucleotide
gatgtgatgttctccatgtt

SEQ ID NO: 1926 - DNA, 20 bp, Artificial Sequence
  Description of Artificial Sequence: Synthetic oligonucleotide
gatgttctccatgttcagcg

SEQ ID NO: 1927 - DNA, 20 bp, Artificial Sequence
  Description of Artificial Sequence: Synthetic oligonucleotide
gattaaagacaggtacagta

SEQ ID NO: 1928 - DNA, 21 bp, Artificial Sequence
  Description of Artificial Sequence: Synthetic oligonucleotide
gattaaagacaggtacagtag

SEQ ID NO: 1929 - DNA, 20 bp, Artificial Sequence
  Description of Artificial Sequence: Synthetic oligonucleotide
gattaaaggtctttgtacta

SEQ ID NO: 1930 - DNA, 20 bp, Artificial Sequence
  Description of Artificial Sequence: Synthetic oligonucleotide
gattaactagatgttctgga

SEQ ID NO: 1931 - DNA, 20 bp, Artificial Sequence
  Description of Artificial Sequence: Synthetic oligonucleotide
gattgaatacatgcatacaa

SEQ ID NO: 1932 - DNA, 20 bp, Artificial Sequence
  Description of Artificial Sequence: Synthetic oligonucleotide
gattgacgataagggagagg

SEQ ID NO: 1933 - DNA, 21 bp, Artificial Sequence
  Description of Artificial Sequence: Synthetic oligonucleotide
gattgacgataagggagaggc

SEQ ID NO: 1934 - DNA, 20 bp, Artificial Sequence
  Description of Artificial Sequence: Synthetic oligonucleotide
gattgagaccttcgtctgcg

SEQ ID NO: 1935 - DNA, 20 bp, Artificial Sequence
  Description of Artificial Sequence: Synthetic oligonucleotide
gattgagatcttctgcgacg

SEQ ID NO: 1936 - DNA, 20 bp, Artificial Sequence
  Description of Artificial Sequence: Synthetic oligonucleotide
gattgctggtggaaagattc

SEQ ID NO: 1937 - DNA, 20 bp, Artificial Sequence
  Description of Artificial Sequence: Synthetic oligonucleotide
gattgggacttcaatcccaa

SEQ ID NO: 1938 - DNA, 20 bp, Artificial Sequence
  Description of Artificial Sequence: Synthetic oligonucleotide
gattggtggaggcaggaggc

SEQ ID NO: 1939 - DNA, 20 bp, Artificial Sequence
  Description of Artificial Sequence: Synthetic oligonucleotide
gatttgctgtgtttgctctg

SEQ ID NO: 1940 - DNA, 20 bp, Artificial Sequence
  Description of Artificial Sequence: Synthetic oligonucleotide
gcaaacattatcgggactga

SEQ ID NO: 1941 - DNA, 21 bp, Artificial Sequence
  Description of Artificial Sequence: Synthetic oligonucleotide
gcaaagaattgcttgcctgag

SEQ ID NO: 1942 - DNA, 20 bp, Artificial Sequence
  Description of Artificial Sequence: Synthetic oligonucleotide
gcaaagtttgtagtatgccc

SEQ ID NO: 1943 - DNA, 20 bp, Artificial Sequence
  Description of Artificial Sequence: Synthetic oligonucleotide
gcaaatatacatcgtatcca

SEQ ID NO: 1944 - DNA, 20 bp, Artificial Sequence
  Description of Artificial Sequence: Synthetic oligonucleotide
gcaaatccagattgggactt

SEQ ID NO: 1945 - DNA, 21 bp, Artificial Sequence
  Description of Artificial Sequence: Synthetic oligonucleotide
gcaaatccgcctcctgcctcc

SEQ ID NO: 1946 - DNA, 20 bp, Artificial Sequence
  Description of Artificial Sequence: Synthetic oligonucleotide
gcaacaggagggatacatag

SEQ ID NO: 1947 - DNA, 20 bp, Artificial Sequence
  Description of Artificial Sequence: Synthetic oligonucleotide
gcaacataccttgatagtcc

SEQ ID NO: 1948 - DNA, 20 bp, Artificial Sequence
  Description of Artificial Sequence: Synthetic oligonucleotide
gcaacggccaggtctgtgcc

SEQ ID NO: 1949 - DNA, 20 bp, Artificial Sequence
  Description of Artificial Sequence: Synthetic oligonucleotide
gcaatgtcaacgaccgacct

SEQ ID NO: 1950 - DNA, 20 bp, Artificial Sequence
  Description of Artificial Sequence: Synthetic oligonucleotide
gcaatttccgtccgaaggtt

SEQ ID NO: 1951 - DNA, 20 bp, Artificial Sequence
  Description of Artificial Sequence: Synthetic oligonucleotide
gcacacggtccggcagatga

SEQ ID NO: 1952 - DNA, 20 bp, Artificial Sequence
  Description of Artificial Sequence: Synthetic oligonucleotide
gcacagacctggccgttgcc

SEQ ID NO: 1953 - DNA, 20 bp, Artificial Sequence
  Description of Artificial Sequence: Synthetic oligonucleotide
gcacagacggggagtccgcg

SEQ ID NO: 1954 - DNA, 21 bp, Artificial Sequence
  Description of Artificial Sequence: Synthetic oligonucleotide
gcacagcctagcagccatgga

SEQ ID NO: 1955 - DNA, 20 bp, Artificial Sequence
  Description of Artificial Sequence: Synthetic oligonucleotide
gcacggaggccttttggggt

SEQ ID NO: 1956 - DNA, 20 bp, Artificial Sequence
  Description of Artificial Sequence: Synthetic oligonucleotide
gcacgggaccatgccgaacc

SEQ ID NO: 1957 - DNA, 20 bp, Artificial Sequence
  Description of Artificial Sequence: Synthetic oligonucleotide
gcactagtaaactgagccag

SEQ ID NO: 1958 - DNA, 20 bp, Artificial Sequence
  Description of Artificial Sequence: Synthetic oligonucleotide
gcactcctccagcttataga

SEQ ID NO: 1959 - DNA, 20 bp, Artificial Sequence
  Description of Artificial Sequence: Synthetic oligonucleotide
gcagacggagaaggggacga

SEQ ID NO: 1960 - DNA, 20 bp, Artificial Sequence
  Description of Artificial Sequence: Synthetic oligonucleotide
gcagaggtgaaaaagttgca

SEQ ID NO: 1961 - DNA, 21 bp, Artificial Sequence
  Description of Artificial Sequence: Synthetic oligonucleotide
gcagaggtgaagcgaagtgca

SEQ ID NO: 1962 - DNA, 20 bp, Artificial Sequence
  Description of Artificial Sequence: Synthetic oligonucleotide
gcagatgagaaggcacagac

SEQ ID NO: 1963 - DNA, 21 bp, Artificial Sequence
  Description of Artificial Sequence: Synthetic oligonucleotide
gcagatgagaaggcacagacg

SEQ ID NO: 1964 - DNA, 20 bp, Artificial Sequence
  Description of Artificial Sequence: Synthetic oligonucleotide
gcagcacagcctagcagcca

SEQ ID NO: 1965 - DNA, 20 bp, Artificial Sequence
  Description of Artificial Sequence: Synthetic oligonucleotide
gcaggaggcggatttgctgg

SEQ ID NO: 1966 - DNA, 20 bp, Artificial Sequence
  Description of Artificial Sequence: Synthetic oligonucleotide
gcaggataaccacattgtgt

SEQ ID NO: 1967 - DNA, 20 bp, Artificial Sequence
  Description of Artificial Sequence: Synthetic oligonucleotide
gcaggctttcactttctcgc

SEQ ID NO: 1968 - DNA, 20 bp, Artificial Sequence
  Description of Artificial Sequence: Synthetic oligonucleotide
gcagggtccccaatcctcga

SEQ ID NO: 1969 - DNA, 20 bp, Artificial Sequence
  Description of Artificial Sequence: Synthetic oligonucleotide
gcaggttcggcatggtcccg

SEQ ID NO: 1970 - DNA, 21 bp, Artificial Sequence
  Description of Artificial Sequence: Synthetic oligonucleotide
gcaggttcggcatggtcccgt

SEQ ID NO: 1971 - DNA, 21 bp, Artificial Sequence
  Description of Artificial Sequence: Synthetic oligonucleotide
gcagtagtcatgcaggttcgg

SEQ ID NO: 1972 - DNA, 20 bp, Artificial Sequence
  Description of Artificial Sequence: Synthetic oligonucleotide
gcagtatggatcggcagagg

SEQ ID NO: 1973 - DNA, 20 bp, Artificial Sequence
  Description of Artificial Sequence: Synthetic oligonucleotide
gcatacaagggcattaacgc

SEQ ID NO: 1974 - DNA, 21 bp, Artificial Sequence
  Description of Artificial Sequence: Synthetic oligonucleotide
gcatagcagcaggatgaagag

SEQ ID NO: 1975 - DNA, 20 bp, Artificial Sequence
  Description of Artificial Sequence: Synthetic oligonucleotide
gcatctagagacctagtagt

SEQ ID NO: 1976 - DNA, 20 bp, Artificial Sequence
  Description of Artificial Sequence: Synthetic oligonucleotide
gcatggacatcgacccttat

SEQ ID NO: 1977 - DNA, 21 bp, Artificial Sequence
  Description of Artificial Sequence: Synthetic oligonucleotide
gcatggacatcgacccttata

SEQ ID NO: 1978 - DNA, 20 bp, Artificial Sequence
  Description of Artificial Sequence: Synthetic oligonucleotide
gcatgtattcaatctaagca

SEQ ID NO: 1979 - DNA, 20 bp, Artificial Sequence
  Description of Artificial Sequence: Synthetic oligonucleotide
gcatttggtggtctataagc

SEQ ID NO: 1980 - DNA, 20 bp, Artificial Sequence
  Description of Artificial Sequence: Synthetic oligonucleotide
gccaagtctgtacagcatct

SEQ ID NO: 1981 - DNA, 20 bp, Artificial Sequence
  Description of Artificial Sequence: Synthetic oligonucleotide
gccagacgccaacaaggtag

SEQ ID NO: 1982 - DNA, 20 bp, Artificial Sequence
  Description of Artificial Sequence: Synthetic oligonucleotide
gccagtgggggttgcgtcag

SEQ ID NO: 1983 - DNA, 20 bp, Artificial Sequence
  Description of Artificial Sequence: Synthetic oligonucleotide
gccatttgttcagtggttcg

SEQ ID NO: 1984 - DNA, 20 bp, Artificial Sequence
  Description of Artificial Sequence: Synthetic oligonucleotide
gcccacttacagttaatgag

SEQ ID NO: 1985 - DNA, 20 bp, Artificial Sequence
  Description of Artificial Sequence: Synthetic oligonucleotide
gcccatgaccaagccccagc

SEQ ID NO: 1986 - DNA, 20 bp, Artificial Sequence
  Description of Artificial Sequence: Synthetic oligonucleotide
gccccgtggtcggtcggaac

SEQ ID NO: 1987 - DNA, 20 bp, Artificial Sequence
  Description of Artificial Sequence: Synthetic oligonucleotide
gcccgtttgtcctctaattc

SEQ ID NO: 1988 - DNA, 20 bp, Artificial Sequence
  Description of Artificial Sequence: Synthetic oligonucleotide
gccgcttgttttgctcgcag

SEQ ID NO: 1989 - DNA, 21 bp, Artificial Sequence
  Description of Artificial Sequence: Synthetic oligonucleotide
gccgggcaacggggtaaaggt

SEQ ID NO: 1990 - DNA, 20 bp, Artificial Sequence
  Description of Artificial Sequence: Synthetic oligonucleotide
gccgttgccgggcaacgggg

SEQ ID NO: 1991 - DNA, 21 bp, Artificial Sequence
  Description of Artificial Sequence: Synthetic oligonucleotide
gccgttgccgggcaacggggt

SEQ ID NO: 1992 - DNA, 21 bp, Artificial Sequence
  Description of Artificial Sequence: Synthetic oligonucleotide
gcctaaagttcaggcaactct

SEQ ID NO: 1993 - DNA, 21 bp, Artificial Sequence
  Description of Artificial Sequence: Synthetic oligonucleotide
gcctacaaactgttcacattt

SEQ ID NO: 1994 - DNA, 20 bp, Artificial Sequence
  Description of Artificial Sequence: Synthetic oligonucleotide
gcctacagcctcctagtaca

SEQ ID NO: 1995 - DNA, 21 bp, Artificial Sequence
  Description of Artificial Sequence: Synthetic oligonucleotide
gcctcagcccgtttctcctgg

SEQ ID NO: 1996 - DNA, 20 bp, Artificial Sequence
  Description of Artificial Sequence: Synthetic oligonucleotide
gcctcagctctgtatcggga

SEQ ID NO: 1997 - DNA, 20 bp, Artificial Sequence
  Description of Artificial Sequence: Synthetic oligonucleotide
gcctccaccaatcgccagac

SEQ ID NO: 1998 - DNA, 20 bp, Artificial Sequence
  Description of Artificial Sequence: Synthetic oligonucleotide
gcctcgtcgtctaacaacag

SEQ ID NO: 1999 - DNA, 21 bp, Artificial Sequence
  Description of Artificial Sequence: Synthetic oligonucleotide
gcctctcactctgggatcttg

SEQ ID NO: 2000 - DNA, 20 bp, Artificial Sequence
  Description of Artificial Sequence: Synthetic oligonucleotide
gcctgaggatgagtgtttct

SEQ ID NO: 2001 - DNA, 21 bp, Artificial Sequence
  Description of Artificial Sequence: Synthetic oligonucleotide
gcctgaggatgagtgtttctc

SEQ ID NO: 2002 - DNA, 20 bp, Artificial Sequence
  Description of Artificial Sequence: Synthetic oligonucleotide
gcctgagggctccaccccaa

SEQ ID NO: 2003 - DNA, 20 bp, Artificial Sequence
  Description of Artificial Sequence: Synthetic oligonucleotide
gcctgctaggttttatccaa

SEQ ID NO: 2004 - DNA, 20 bp, Artificial Sequence
  Description of Artificial Sequence: Synthetic oligonucleotide
gcctgcttagattgaataca

SEQ ID NO: 2005 - DNA, 20 bp, Artificial Sequence
  Description of Artificial Sequence: Synthetic oligonucleotide
gcctgtatttccctgctggt

SEQ ID NO: 2006 - DNA, 20 bp, Artificial Sequence
  Description of Artificial Sequence: Synthetic oligonucleotide
gccttctgacttctttcctt

SEQ ID NO: 2007 - DNA, 20 bp, Artificial Sequence
  Description of Artificial Sequence: Synthetic oligonucleotide
gccttttggggtggagccct

SEQ ID NO: 2008 - DNA, 20 bp, Artificial Sequence
  Description of Artificial Sequence: Synthetic oligonucleotide
gcgaagtgcacacggtccgg

SEQ ID NO: 2009 - DNA, 20 bp, Artificial Sequence
  Description of Artificial Sequence: Synthetic oligonucleotide
gcgacgtgcagaggtgaagc

SEQ ID NO: 2010 - DNA, 20 bp, Artificial Sequence
  Description of Artificial Sequence: Synthetic oligonucleotide
gcgagggagttcttcttcta

SEQ ID NO: 2011 - DNA, 20 bp, Artificial Sequence
  Description of Artificial Sequence: Synthetic oligonucleotide
gcgattgagaccttcgtctg

SEQ ID NO: 2012 - DNA, 20 bp, Artificial Sequence
  Description of Artificial Sequence: Synthetic oligonucleotide
gcgcagggtccccaatcctc

SEQ ID NO: 2013 - DNA, 20 bp, Artificial Sequence
  Description of Artificial Sequence: Synthetic oligonucleotide
gcgcgtgcgtggaacctttt

SEQ ID NO: 2014 - DNA, 20 bp, Artificial Sequence
  Description of Artificial Sequence: Synthetic oligonucleotide
gcgctgatggcccatgacca

SEQ ID NO: 2015 - DNA, 21 bp, Artificial Sequence
  Description of Artificial Sequence: Synthetic oligonucleotide
gcgggagaggacaacagagtt

SEQ ID NO: 2016 - DNA, 20 bp, Artificial Sequence
  Description of Artificial Sequence: Synthetic oligonucleotide
gcggggtttttcttgttgac

SEQ ID NO: 2017 - DNA, 20 bp, Artificial Sequence
  Description of Artificial Sequence: Synthetic oligonucleotide
gcgggtatattatataagag

SEQ ID NO: 2018 - DNA, 20 bp, Artificial Sequence
  Description of Artificial Sequence: Synthetic oligonucleotide
gctaggctgtgctgccaact

SEQ ID NO: 2019 - DNA, 20 bp, Artificial Sequence
  Description of Artificial Sequence: Synthetic oligonucleotide
gctatgcctcatcttcttgt

SEQ ID NO: 2020 - DNA, 20 bp, Artificial Sequence
  Description of Artificial Sequence: Synthetic oligonucleotide
gctccagacctgctgcgagc

SEQ ID NO: 2021 - DNA, 20 bp, Artificial Sequence
  Description of Artificial Sequence: Synthetic oligonucleotide
gctcctaccttgttggcgtc

SEQ ID NO: 2022 - DNA, 20 bp, Artificial Sequence
  Description of Artificial Sequence: Synthetic oligonucleotide
gctcctgaactggagccacc

SEQ ID NO: 2023 - DNA, 20 bp, Artificial Sequence
  Description of Artificial Sequence: Synthetic oligonucleotide
gctcgcagcaggtctggagc

SEQ ID NO: 2024 - DNA, 20 bp, Artificial Sequence
  Description of Artificial Sequence: Synthetic oligonucleotide
gctctgtatcgggaagcctt

SEQ ID NO: 2025 - DNA, 20 bp, Artificial Sequence
  Description of Artificial Sequence: Synthetic oligonucleotide
gctgaggcccactcccatag

SEQ ID NO: 2026 - DNA, 20 bp, Artificial Sequence
  Description of Artificial Sequence: Synthetic oligonucleotide
gctgccccatttacacaatg

SEQ ID NO: 2027 - DNA, 21 bp, Artificial Sequence
  Description of Artificial Sequence: Synthetic oligonucleotide
gctgctaggctgtgctgccaa

SEQ ID NO: 2028 - DNA, 20 bp, Artificial Sequence
  Description of Artificial Sequence: Synthetic oligonucleotide
gctggatccaactggtggtc

SEQ ID NO: 2029 - DNA, 20 bp, Artificial Sequence
  Description of Artificial Sequence: Synthetic oligonucleotide
gctggtggctccagttcagg

SEQ ID NO: 2030 - DNA, 20 bp, Artificial Sequence
  Description of Artificial Sequence: Synthetic oligonucleotide
gctggtggttgaggatcctg

SEQ ID NO: 2031 - DNA, 20 bp, Artificial Sequence
  Description of Artificial Sequence: Synthetic oligonucleotide
gctgtagatcttgttcccaa

SEQ ID NO: 2032 - DNA, 20 bp, Artificial Sequence
  Description of Artificial Sequence: Synthetic oligonucleotide
gctgtaggcataaattggtc

SEQ ID NO: 2033 - DNA, 20 bp, Artificial Sequence
  Description of Artificial Sequence: Synthetic oligonucleotide
gctgtgtttgctctgaaggc

SEQ ID NO: 2034 - DNA, 20 bp, Artificial Sequence
  Description of Artificial Sequence: Synthetic oligonucleotide
gcttcccgatacagagctga

SEQ ID NO: 2035 - DNA, 21 bp, Artificial Sequence
  Description of Artificial Sequence: Synthetic oligonucleotide
gcttgcctgagtgcagtatgg

SEQ ID NO: 2036 - DNA, 20 bp, Artificial Sequence
  Description of Artificial Sequence: Synthetic oligonucleotide
gcttggaggcttgaacagta

SEQ ID NO: 2037 - DNA, 20 bp, Artificial Sequence
  Description of Artificial Sequence: Synthetic oligonucleotide
gcttggtcatgggccatcag

SEQ ID NO: 2038 - DNA, 21 bp, Artificial Sequence
  Description of Artificial Sequence: Synthetic oligonucleotide
gctttcccccactgtttggct

SEQ ID NO: 2039 - DNA, 20 bp, Artificial Sequence
  Description of Artificial Sequence: Synthetic oligonucleotide
gctttcggaaaattcctatg

SEQ ID NO: 2040 - DNA, 20 bp, Artificial Sequence
  Description of Artificial Sequence: Synthetic oligonucleotide
ggaaaattcctatgggagtg

SEQ ID NO: 2041 - DNA, 21 bp, Artificial Sequence
  Description of Artificial Sequence: Synthetic oligonucleotide
ggaaagattctgccccatgct

SEQ ID NO: 2042 - DNA, 21 bp, Artificial Sequence
  Description of Artificial Sequence: Synthetic oligonucleotide
ggaaatacaggcctctcactc

SEQ ID NO: 2043 - DNA, 20 bp, Artificial Sequence
  Description of Artificial Sequence: Synthetic oligonucleotide
ggaacagggtttactgctcc

SEQ ID NO: 2044 - DNA, 20 bp, Artificial Sequence
  Description of Artificial Sequence: Synthetic oligonucleotide
ggaacggcagacggagaagg

SEQ ID NO: 2045 - DNA, 21 bp, Artificial Sequence
  Description of Artificial Sequence: Synthetic oligonucleotide
ggaactaatgactctagctac

SEQ ID NO: 2046 - DNA, 21 bp, Artificial Sequence
  Description of Artificial Sequence: Synthetic oligonucleotide
ggaactaccgtgtgtcttggc

SEQ ID NO: 2047 - DNA, 21 bp, Artificial Sequence
  Description of Artificial Sequence: Synthetic oligonucleotide
ggaagatccagcatctagaga

SEQ ID NO: 2048 - DNA, 20 bp, Artificial Sequence
  Description of Artificial Sequence: Synthetic oligonucleotide
ggaagatgataaaacgccgc

SEQ ID NO: 2049 - DNA, 20 bp, Artificial Sequence
  Description of Artificial Sequence: Synthetic oligonucleotide
ggaagccttagagtctcctg

SEQ ID NO: 2050 - DNA, 20 bp, Artificial Sequence
  Description of Artificial Sequence: Synthetic oligonucleotide
ggaaggcgggtatattatat

SEQ ID NO: 2051 - DNA, 20 bp, Artificial Sequence
  Description of Artificial Sequence: Synthetic oligonucleotide
ggaagtgttgataggatagg

SEQ ID NO: 2052 - DNA, 20 bp, Artificial Sequence
  Description of Artificial Sequence: Synthetic oligonucleotide
ggaattagaggacaaacggg

SEQ ID NO: 2053 - DNA, 21 bp, Artificial Sequence
  Description of Artificial Sequence: Synthetic oligonucleotide
ggacaagttggaggacaggag

SEQ ID NO: 2054 - DNA, 21 bp, Artificial Sequence
  Description of Artificial Sequence: Synthetic oligonucleotide
ggacacctggccagacgccaa

SEQ ID NO: 2055 - DNA, 20 bp, Artificial Sequence
  Description of Artificial Sequence: Synthetic oligonucleotide
ggacatgaacaagagatgat

SEQ ID NO: 2056 - DNA, 20 bp, Artificial Sequence
  Description of Artificial Sequence: Synthetic oligonucleotide
ggaccccttctcgtgttaca

SEQ ID NO: 2057 - DNA, 20 bp, Artificial Sequence
  Description of Artificial Sequence: Synthetic oligonucleotide
ggaccctgcgctgaacatgg

SEQ ID NO: 2058 - DNA, 20 bp, Artificial Sequence
  Description of Artificial Sequence: Synthetic oligonucleotide
ggacctgcctcgtcgtctaa

SEQ ID NO: 2059 - DNA, 21 bp, Artificial Sequence
  Description of Artificial Sequence: Synthetic oligonucleotide
ggacctgcctcgtcgtctaac

SEQ ID NO: 2060 - DNA, 21 bp, Artificial Sequence
  Description of Artificial Sequence: Synthetic oligonucleotide
ggagaccaccgtgaacgccca

SEQ ID NO: 2061 - DNA, 20 bp, Artificial Sequence
  Description of Artificial Sequence: Synthetic oligonucleotide
ggagaggacaacagagttat

SEQ ID NO: 2062 - DNA, 20 bp, Artificial Sequence
  Description of Artificial Sequence: Synthetic oligonucleotide
ggagaggcagtagtcggaac

SEQ ID NO: 2063 - DNA, 20 bp, Artificial Sequence
  Description of Artificial Sequence: Synthetic oligonucleotide
ggagcaaacattatcgggac

SEQ ID NO: 2064 - DNA, 20 bp, Artificial Sequence
  Description of Artificial Sequence: Synthetic oligonucleotide
ggagctggagcattcgggct

SEQ ID NO: 2065 - DNA, 20 bp, Artificial Sequence
  Description of Artificial Sequence: Synthetic oligonucleotide
ggaggttggtgagtgattgg

SEQ ID NO: 2066 - DNA, 20 bp, Artificial Sequence
  Description of Artificial Sequence: Synthetic oligonucleotide
ggagtccgcgtaaagagagg

SEQ ID NO: 2067 - DNA, 21 bp, Artificial Sequence
  Description of Artificial Sequence: Synthetic oligonucleotide
ggataaaacctagcaggcata

SEQ ID NO: 2068 - DNA, 20 bp, Artificial Sequence
  Description of Artificial Sequence: Synthetic oligonucleotide
ggataaccacattgtgtaaa

SEQ ID NO: 2069 - DNA, 20 bp, Artificial Sequence
  Description of Artificial Sequence: Synthetic oligonucleotide
ggatacatagaggttccttg

SEQ ID NO: 2070 - DNA, 20 bp, Artificial Sequence
  Description of Artificial Sequence: Synthetic oligonucleotide
ggatacgatgtatatttgcg

SEQ ID NO: 2071 - DNA, 20 bp, Artificial Sequence
  Description of Artificial Sequence: Synthetic oligonucleotide
ggatccaactggtggtcggg

SEQ ID NO: 2072 - DNA, 21 bp, Artificial Sequence
  Description of Artificial Sequence: Synthetic oligonucleotide
ggatccaactggtggtcggga

SEQ ID NO: 2073 - DNA, 20 bp, Artificial Sequence
  Description of Artificial Sequence: Synthetic oligonucleotide
ggatcctcaaccaccagcac

SEQ ID NO: 2074 - DNA, 20 bp, Artificial Sequence
  Description of Artificial Sequence: Synthetic oligonucleotide
ggatcctggaattagaggac

SEQ ID NO: 2075 - DNA, 20 bp, Artificial Sequence
  Description of Artificial Sequence: Synthetic oligonucleotide
ggatcggcagaggagccgaa

SEQ ID NO: 2076 - DNA, 20 bp, Artificial Sequence
  Description of Artificial Sequence: Synthetic oligonucleotide
ggatcttgcagagtttggtg

SEQ ID NO: 2077 - DNA, 20 bp, Artificial Sequence
  Description of Artificial Sequence: Synthetic oligonucleotide
ggatgaagaggaagatgata

SEQ ID NO: 2078 - DNA, 20 bp, Artificial Sequence
  Description of Artificial Sequence: Synthetic oligonucleotide
ggatgagtgtttctcaaagg

SEQ ID NO: 2079 - DNA, 20 bp, Artificial Sequence
  Description of Artificial Sequence: Synthetic oligonucleotide
ggatgatgggatgggaatac

SEQ ID NO: 2080 - DNA, 20 bp, Artificial Sequence
  Description of Artificial Sequence: Synthetic oligonucleotide
ggattaaagacaggtacagt

SEQ ID NO: 2081 - DNA, 21 bp, Artificial Sequence
  Description of Artificial Sequence: Synthetic oligonucleotide
ggattctttcccgaccaccag

SEQ ID NO: 2082 - DNA, 20 bp, Artificial Sequence
  Description of Artificial Sequence: Synthetic oligonucleotide
ggatttgctggcaaagtttg

SEQ ID NO: 2083 - DNA, 20 bp, Artificial Sequence
  Description of Artificial Sequence: Synthetic oligonucleotide
ggatttgctgtgtttgctct

SEQ ID NO: 2084 - DNA, 20 bp, Artificial Sequence
  Description of Artificial Sequence: Synthetic oligonucleotide
ggcaacataccttgatagtc

SEQ ID NO: 2085 - DNA, 20 bp, Artificial Sequence
  Description of Artificial Sequence: Synthetic oligonucleotide
ggcaacggccaggtctgtgc

SEQ ID NO: 2086 - DNA, 20 bp, Artificial Sequence
  Description of Artificial Sequence: Synthetic oligonucleotide
ggcacagacctggccgttgc

SEQ ID NO: 2087 - DNA, 20 bp, Artificial Sequence
  Description of Artificial Sequence: Synthetic oligonucleotide
ggcagacggagaaggggacg

SEQ ID NO: 2088 - DNA, 20 bp, Artificial Sequence
  Description of Artificial Sequence: Synthetic oligonucleotide
ggcagatgagaaggcacaga

SEQ ID NO: 2089 - DNA, 21 bp, Artificial Sequence
  Description of Artificial Sequence: Synthetic oligonucleotide
ggcagcaaaacccaaaagacc

SEQ ID NO: 2090 - DNA, 21 bp, Artificial Sequence
  Description of Artificial Sequence: Synthetic oligonucleotide
ggcaggaggcggatttgctgg

SEQ ID NO: 2091 - DNA, 20 bp, Artificial Sequence
  Description of Artificial Sequence: Synthetic oligonucleotide
ggcatactacaaactttgcc

SEQ ID NO: 2092 - DNA, 20 bp, Artificial Sequence
  Description of Artificial Sequence: Synthetic oligonucleotide
ggcatggacatcgaccctta

SEQ ID NO: 2093 - DNA, 20 bp, Artificial Sequence
  Description of Artificial Sequence: Synthetic oligonucleotide
ggccagacgccaacaaggta

SEQ ID NO: 2094 - DNA, 20 bp, Artificial Sequence
  Description of Artificial Sequence: Synthetic oligonucleotide
ggcccacttacagttaatga

SEQ ID NO: 2095 - DNA, 20 bp, Artificial Sequence
  Description of Artificial Sequence: Synthetic oligonucleotide
ggcccatattagtgttgaca

SEQ ID NO: 2096 - DNA, 20 bp, Artificial Sequence
  Description of Artificial Sequence: Synthetic oligonucleotide
ggcctcagcccgtttctcct

SEQ ID NO: 2097 - DNA, 20 bp, Artificial Sequence
  Description of Artificial Sequence: Synthetic oligonucleotide
ggcctccgtgcggtggggtg

SEQ ID NO: 2098 - DNA, 20 bp, Artificial Sequence
  Description of Artificial Sequence: Synthetic oligonucleotide
ggcctctcactctgggatct

SEQ ID NO: 2099 - DNA, 20 bp, Artificial Sequence
  Description of Artificial Sequence: Synthetic oligonucleotide
ggcctgtatttccctgctgg

SEQ ID NO: 2100 - DNA, 21 bp, Artificial Sequence
  Description of Artificial Sequence: Synthetic oligonucleotide
ggcgagaaagtgaaagcctgc

SEQ ID NO: 2101 - DNA, 20 bp, Artificial Sequence
  Description of Artificial Sequence: Synthetic oligonucleotide
ggcgagggagttcttcttct

SEQ ID NO: 2102 - DNA, 20 bp, Artificial Sequence
  Description of Artificial Sequence: Synthetic oligonucleotide
ggcgattggtggaggcagga

SEQ ID NO: 2103 - DNA, 21 bp, Artificial Sequence
  Description of Artificial Sequence: Synthetic oligonucleotide
ggcgattggtggaggcaggag

SEQ ID NO: 2104 - DNA, 21 bp, Artificial Sequence
  Description of Artificial Sequence: Synthetic oligonucleotide
ggcggatttgctggcaaagtt

SEQ ID NO: 2105 - DNA, 20 bp, Artificial Sequence
  Description of Artificial Sequence: Synthetic oligonucleotide
ggcggggtttttcttgttga

SEQ ID NO: 2106 - DNA, 20 bp, Artificial Sequence
  Description of Artificial Sequence: Synthetic oligonucleotide
ggcgggtatattatataaga

SEQ ID NO: 2107 - DNA, 20 bp, Artificial Sequence
  Description of Artificial Sequence: Synthetic oligonucleotide
ggctaggagttccgcagtat

SEQ ID NO: 2108 - DNA, 20 bp, Artificial Sequence
  Description of Artificial Sequence: Synthetic oligonucleotide
ggctgaggcccactcccata

SEQ ID NO: 2109 - DNA, 20 bp, Artificial Sequence
  Description of Artificial Sequence: Synthetic oligonucleotide
ggctggatccaactggtggt

SEQ ID NO: 2110 - DNA, 20 bp, Artificial Sequence
  Description of Artificial Sequence: Synthetic oligonucleotide
ggcttcccgatacagagctg

SEQ ID NO: 2111 - DNA, 21 bp, Artificial Sequence
  Description of Artificial Sequence: Synthetic oligonucleotide
ggcttcccgatacagagctga

SEQ ID NO: 2112 - DNA, 21 bp, Artificial Sequence
  Description of Artificial Sequence: Synthetic oligonucleotide
ggctttcagttatatggatga

SEQ ID NO: 2113 - DNA, 20 bp, Artificial Sequence
  Description of Artificial Sequence: Synthetic oligonucleotide
ggctttcggaaaattcctat

SEQ ID NO: 2114 - DNA, 20 bp, Artificial Sequence
  Description of Artificial Sequence: Synthetic oligonucleotide
gggaaagaatcccagaggat

SEQ ID NO: 2115 - DNA, 21 bp, Artificial Sequence
  Description of Artificial Sequence: Synthetic oligonucleotide
gggaaagaatcccagaggatt

SEQ ID NO: 2116 - DNA, 20 bp, Artificial Sequence
  Description of Artificial Sequence: Synthetic oligonucleotide
gggaagccttagagtctcct

SEQ ID NO: 2117 - DNA, 20 bp, Artificial Sequence
  Description of Artificial Sequence: Synthetic oligonucleotide
gggaccatgccgaacctgca

SEQ ID NO: 2118 - DNA, 20 bp, Artificial Sequence
  Description of Artificial Sequence: Synthetic oligonucleotide
gggaccctgcgctgaacatg

SEQ ID NO: 2119 - DNA, 20 bp, Artificial Sequence
  Description of Artificial Sequence: Synthetic oligonucleotide
gggagaggcagtagtcggaa

SEQ ID NO: 2120 - DNA, 21 bp, Artificial Sequence
  Description of Artificial Sequence: Synthetic oligonucleotide
gggaggagttgggggaggaga

SEQ ID NO: 2121 - DNA, 20 bp, Artificial Sequence
  Description of Artificial Sequence: Synthetic oligonucleotide
gggatacatagaggttcctt

SEQ ID NO: 2122 - DNA, 21 bp, Artificial Sequence
  Description of Artificial Sequence: Synthetic oligonucleotide
gggatacatagaggttccttg

SEQ ID NO: 2123 - DNA, 20 bp, Artificial Sequence
  Description of Artificial Sequence: Synthetic oligonucleotide
gggatcttgcagagtttggt

SEQ ID NO: 2124 - DNA, 21 bp, Artificial Sequence
  Description of Artificial Sequence: Synthetic oligonucleotide
gggatcttgcagagtttggtg

SEQ ID NO: 2125 - DNA, 21 bp, Artificial Sequence
  Description of Artificial Sequence: Synthetic oligonucleotide
gggcaacattcggtgggcgtt

SEQ ID NO: 2126 - DNA, 20 bp, Artificial Sequence
  Description of Artificial Sequence: Synthetic oligonucleotide
gggcaacggggtaaaggttc

SEQ ID NO: 2127 - DNA, 20 bp, Artificial Sequence
  Description of Artificial Sequence: Synthetic oligonucleotide
gggcatactacaaactttgc

SEQ ID NO: 2128 - DNA, 21 bp, Artificial Sequence
  Description of Artificial Sequence: Synthetic oligonucleotide
gggccaagtctgtacagcatc

SEQ ID NO: 2129 - DNA, 20 bp, Artificial Sequence
  Description of Artificial Sequence: Synthetic oligonucleotide
gggcctcagcccgtttctcc

SEQ ID NO: 2130 - DNA, 20 bp, Artificial Sequence
  Description of Artificial Sequence: Synthetic oligonucleotide
gggcgcacctctctttacgc

SEQ ID NO: 2131 - DNA, 20 bp, Artificial Sequence
  Description of Artificial Sequence: Synthetic oligonucleotide
gggctgaggcccactcccat

SEQ ID NO: 2132 - DNA, 20 bp, Artificial Sequence
  Description of Artificial Sequence: Synthetic oligonucleotide
gggcttggtcatgggccatc

SEQ ID NO: 2133 - DNA, 20 bp, Artificial Sequence
  Description of Artificial Sequence: Synthetic oligonucleotide
gggctttcggaaaattccta

SEQ ID NO: 2134 - DNA, 21 bp, Artificial Sequence
  Description of Artificial Sequence: Synthetic oligonucleotide
gggctttcggaaaattcctat

SEQ ID NO: 2135 - DNA, 20 bp, Artificial Sequence
  Description of Artificial Sequence: Synthetic oligonucleotide
ggggaactaccgtgtgtctt

SEQ ID NO: 2136 - DNA, 20 bp, Artificial Sequence
  Description of Artificial Sequence: Synthetic oligonucleotide
ggggaccctgcgctgaacat

SEQ ID NO: 2137 - DNA, 20 bp, Artificial Sequence
  Description of Artificial Sequence: Synthetic oligonucleotide
ggggacgagagagtcccaag

SEQ ID NO: 2138 - DNA, 20 bp, Artificial Sequence
  Description of Artificial Sequence: Synthetic oligonucleotide
ggggcttggtcatgggccat

SEQ ID NO: 2139 - DNA, 20 bp, Artificial Sequence
  Description of Artificial Sequence: Synthetic oligonucleotide
gggggaactaccgtgtgtct

SEQ ID NO: 2140 - DNA, 20 bp, Artificial Sequence
  Description of Artificial Sequence: Synthetic oligonucleotide
gggggaggagattagattaa

SEQ ID NO: 2141 - DNA, 20 bp, Artificial Sequence
  Description of Artificial Sequence: Synthetic oligonucleotide
ggggtgaaacccagcccgaa

SEQ ID NO: 2142 - DNA, 20 bp, Artificial Sequence
  Description of Artificial Sequence: Synthetic oligonucleotide
ggggtggagccctcaggctc

SEQ ID NO: 2143 - DNA, 20 bp, Artificial Sequence
  Description of Artificial Sequence: Synthetic oligonucleotide
ggggtttttcttgttgacaa

SEQ ID NO: 2144 - DNA, 20 bp, Artificial Sequence
  Description of Artificial Sequence: Synthetic oligonucleotide
gggtaggctgccttcctgtc

SEQ ID NO: 2145 - DNA, 21 bp, Artificial Sequence
  Description of Artificial Sequence: Synthetic oligonucleotide
gggtaggctgccttcctgtct

SEQ ID NO: 2146 - DNA, 20 bp, Artificial Sequence
  Description of Artificial Sequence: Synthetic oligonucleotide
gggtatattatataagagag

SEQ ID NO: 2147 - DNA, 20 bp, Artificial Sequence
  Description of Artificial Sequence: Synthetic oligonucleotide
gggtattaaaccttattatc

SEQ ID NO: 2148 - DNA, 21 bp, Artificial Sequence
  Description of Artificial Sequence: Synthetic oligonucleotide
gggtcaccatattcttgggaa

SEQ ID NO: 2149 - DNA, 20 bp, Artificial Sequence
  Description of Artificial Sequence: Synthetic oligonucleotide
gggtcctaggaatcctgatg

SEQ ID NO: 2150 - DNA, 20 bp, Artificial Sequence
  Description of Artificial Sequence: Synthetic oligonucleotide
gggtcgatgtccatgcccca

SEQ ID NO: 2151 - DNA, 20 bp, Artificial Sequence
  Description of Artificial Sequence: Synthetic oligonucleotide
gggtcgtccgcaggattcag

SEQ ID NO: 2152 - DNA, 20 bp, Artificial Sequence
  Description of Artificial Sequence: Synthetic oligonucleotide
gggtggagccctcaggctca

SEQ ID NO: 2153 - DNA, 20 bp, Artificial Sequence
  Description of Artificial Sequence: Synthetic oligonucleotide
gggtgttaatttggaagatc

SEQ ID NO: 2154 - DNA, 20 bp, Artificial Sequence
  Description of Artificial Sequence: Synthetic oligonucleotide
gggttactctctgaatttta

SEQ ID NO: 2155 - DNA, 20 bp, Artificial Sequence
  Description of Artificial Sequence: Synthetic oligonucleotide
gggtttaaatgtatacccaa

SEQ ID NO: 2156 - DNA, 20 bp, Artificial Sequence
  Description of Artificial Sequence: Synthetic oligonucleotide
gggtttactgctcctgaact

SEQ ID NO: 2157 - DNA, 20 bp, Artificial Sequence
  Description of Artificial Sequence: Synthetic oligonucleotide
gggtttcaccccaccgcacg

SEQ ID NO: 2158 - DNA, 20 bp, Artificial Sequence
  Description of Artificial Sequence: Synthetic oligonucleotide
ggtaaatatttggtaacctt

SEQ ID NO: 2159 - DNA, 20 bp, Artificial Sequence
  Description of Artificial Sequence: Synthetic oligonucleotide
ggtaacctttggataaaacc

SEQ ID NO: 2160 - DNA, 20 bp, Artificial Sequence
  Description of Artificial Sequence: Synthetic oligonucleotide
ggtaggagctggagcattcg

SEQ ID NO: 2161 - DNA, 20 bp, Artificial Sequence
  Description of Artificial Sequence: Synthetic oligonucleotide
ggtaggctgccttcctgtct

SEQ ID NO: 2162 - DNA, 20 bp, Artificial Sequence
  Description of Artificial Sequence: Synthetic oligonucleotide
ggtagttccccctagaaaat

SEQ ID NO: 2163 - DNA, 20 bp, Artificial Sequence
  Description of Artificial Sequence: Synthetic oligonucleotide
ggtattaaaccttattatcc

SEQ ID NO: 2164 - DNA, 20 bp, Artificial Sequence
  Description of Artificial Sequence: Synthetic oligonucleotide
ggtattgtgaggattcttgt

SEQ ID NO: 2165 - DNA, 20 bp, Artificial Sequence
  Description of Artificial Sequence: Synthetic oligonucleotide
ggtcatgggccatcagcgcg

SEQ ID NO: 2166 - DNA, 20 bp, Artificial Sequence
  Description of Artificial Sequence: Synthetic oligonucleotide
ggtcccgtgctggtggttga

SEQ ID NO: 2167 - DNA, 20 bp, Artificial Sequence
  Description of Artificial Sequence: Synthetic oligonucleotide
ggtcgatgtccatgccccaa

SEQ ID NO: 2168 - DNA, 20 bp, Artificial Sequence
  Description of Artificial Sequence: Synthetic oligonucleotide
ggtcggaacggcagacggag

SEQ ID NO: 2169 - DNA, 20 bp, Artificial Sequence
  Description of Artificial Sequence: Synthetic oligonucleotide
ggtcgggaaagaatcccaga

SEQ ID NO: 2170 - DNA, 20 bp, Artificial Sequence
  Description of Artificial Sequence: Synthetic oligonucleotide
ggtcggtcggaacggcagac

SEQ ID NO: 2171 - DNA, 20 bp, Artificial Sequence
  Description of Artificial Sequence: Synthetic oligonucleotide
ggtcggtcgttgacattgca

SEQ ID NO: 2172 - DNA, 21 bp, Artificial Sequence
  Description of Artificial Sequence: Synthetic oligonucleotide
ggtctctagatgctggatctt

SEQ ID NO: 2173 - DNA, 20 bp, Artificial Sequence
  Description of Artificial Sequence: Synthetic oligonucleotide
ggtctggagcaaacattatc

SEQ ID NO: 2174 - DNA, 20 bp, Artificial Sequence
  Description of Artificial Sequence: Synthetic oligonucleotide
ggtctgtgccaagtgtttgc

SEQ ID NO: 2175 - DNA, 20 bp, Artificial Sequence
  Description of Artificial Sequence: Synthetic oligonucleotide
ggtgaggtgaacaatgctca

SEQ ID NO: 2176 - DNA, 21 bp, Artificial Sequence
  Description of Artificial Sequence: Synthetic oligonucleotide
ggtgcaatttccgtccgaagg

SEQ ID NO: 2177 - DNA, 20 bp, Artificial Sequence
  Description of Artificial Sequence: Synthetic oligonucleotide
ggtgcgccccgtggtcggtc

SEQ ID NO: 2178 - DNA, 20 bp, Artificial Sequence
  Description of Artificial Sequence: Synthetic oligonucleotide
ggtggaaagattctgcccca

SEQ ID NO: 2179 - DNA, 20 bp, Artificial Sequence
  Description of Artificial Sequence: Synthetic oligonucleotide
ggtggggtgaaacccagccc

SEQ ID NO: 2180 - DNA, 20 bp, Artificial Sequence
  Description of Artificial Sequence: Synthetic oligonucleotide
ggtggtcgggaaagaatccc

SEQ ID NO: 2181 - DNA, 21 bp, Artificial Sequence
  Description of Artificial Sequence: Synthetic oligonucleotide
ggtggtcgggaaagaatccca

SEQ ID NO: 2182 - DNA, 20 bp, Artificial Sequence
  Description of Artificial Sequence: Synthetic oligonucleotide
ggtggtctccatgcgacgtg

SEQ ID NO: 2183 - DNA, 20 bp, Artificial Sequence
  Description of Artificial Sequence: Synthetic oligonucleotide
ggtgtaaatgtatattagga

SEQ ID NO: 2184 - DNA, 20 bp, Artificial Sequence
  Description of Artificial Sequence: Synthetic oligonucleotide
ggtgttaatttggaagatcc

SEQ ID NO: 2185 - DNA, 20 bp, Artificial Sequence
  Description of Artificial Sequence: Synthetic oligonucleotide
ggtgttttccaatgaggatt

SEQ ID NO: 2186 - DNA, 20 bp, Artificial Sequence
  Description of Artificial Sequence: Synthetic oligonucleotide
ggttaccaaatatttaccat

SEQ ID NO: 2187 - DNA, 20 bp, Artificial Sequence
  Description of Artificial Sequence: Synthetic oligonucleotide
ggttactctctgaattttat

SEQ ID NO: 2188 - DNA, 20 bp, Artificial Sequence
  Description of Artificial Sequence: Synthetic oligonucleotide
ggttatgtcattggaagtta

SEQ ID NO: 2189 - DNA, 20 bp, Artificial Sequence
  Description of Artificial Sequence: Synthetic oligonucleotide
ggttcaggtattgtttacac

SEQ ID NO: 2190 - DNA, 20 bp, Artificial Sequence
  Description of Artificial Sequence: Synthetic oligonucleotide
ggttccacgcacgcgctgat

SEQ ID NO: 2191 - DNA, 20 bp, Artificial Sequence
  Description of Artificial Sequence: Synthetic oligonucleotide
ggttccttgagcagtagtca

SEQ ID NO: 2192 - DNA, 21 bp, Artificial Sequence
  Description of Artificial Sequence: Synthetic oligonucleotide
ggttccttgagcagtagtcat

SEQ ID NO: 2193 - DNA, 20 bp, Artificial Sequence
  Description of Artificial Sequence: Synthetic oligonucleotide
ggttcggcatggtcccgtgc

SEQ ID NO: 2194 - DNA, 21 bp, Artificial Sequence
  Description of Artificial Sequence: Synthetic oligonucleotide
ggttcggcatggtcccgtgct

SEQ ID NO: 2195 - DNA, 20 bp, Artificial Sequence
  Description of Artificial Sequence: Synthetic oligonucleotide
ggttgaggatcctggaatta

SEQ ID NO: 2196 - DNA, 20 bp, Artificial Sequence
  Description of Artificial Sequence: Synthetic oligonucleotide
ggttggggactgcgaatttt

SEQ ID NO: 2197 - DNA, 20 bp, Artificial Sequence
  Description of Artificial Sequence: Synthetic oligonucleotide
ggtttaatacccttatccaa

SEQ ID NO: 2198 - DNA, 20 bp, Artificial Sequence
  Description of Artificial Sequence: Synthetic oligonucleotide
ggtttactgctcctgaactg

SEQ ID NO: 2199 - DNA, 20 bp, Artificial Sequence
  Description of Artificial Sequence: Synthetic oligonucleotide
ggtttcaccccaccgcacgg

SEQ ID NO: 2200 - DNA, 20 bp, Artificial Sequence
  Description of Artificial Sequence: Synthetic oligonucleotide
ggtttggtacagcaacagga

SEQ ID NO: 2201 - DNA, 20 bp, Artificial Sequence
  Description of Artificial Sequence: Synthetic oligonucleotide
ggttttatccaaaggttacc

SEQ ID NO: 2202 - DNA, 20 bp, Artificial Sequence
  Description of Artificial Sequence: Synthetic oligonucleotide
gtaaaccctgttccgactac

SEQ ID NO: 2203 - DNA, 20 bp, Artificial Sequence
  Description of Artificial Sequence: Synthetic oligonucleotide
gtaaactgagccaggagaaa

SEQ ID NO: 2204 - DNA, 20 bp, Artificial Sequence
  Description of Artificial Sequence: Synthetic oligonucleotide
gtaaagagaggtgcgccccg

SEQ ID NO: 2205 - DNA, 20 bp, Artificial Sequence
  Description of Artificial Sequence: Synthetic oligonucleotide
gtaaatagtgtctagtttgg

SEQ ID NO: 2206 - DNA, 21 bp, Artificial Sequence
  Description of Artificial Sequence: Synthetic oligonucleotide
gtaaatagtgtctagtttgga

SEQ ID NO: 2207 - DNA, 20 bp, Artificial Sequence
  Description of Artificial Sequence: Synthetic oligonucleotide
gtaaatatttggtaaccttt

SEQ ID NO: 2208 - DNA, 20 bp, Artificial Sequence
  Description of Artificial Sequence: Synthetic oligonucleotide
gtaaatggggcagcaaaacc

SEQ ID NO: 2209 - DNA, 20 bp, Artificial Sequence
  Description of Artificial Sequence: Synthetic oligonucleotide
gtaacacgagaaggggtcct

SEQ ID NO: 2210 - DNA, 20 bp, Artificial Sequence
  Description of Artificial Sequence: Synthetic oligonucleotide
gtaacctttggataaaacct

SEQ ID NO: 2211 - DNA, 20 bp, Artificial Sequence
  Description of Artificial Sequence: Synthetic oligonucleotide
gtaagaccttgggcaacatt

SEQ ID NO: 2212 - DNA, 20 bp, Artificial Sequence
  Description of Artificial Sequence: Synthetic oligonucleotide
gtaagttggcgagaaagtga

SEQ ID NO: 2213 - DNA, 20 bp, Artificial Sequence
  Description of Artificial Sequence: Synthetic oligonucleotide
gtactaggaggctgtaggca

SEQ ID NO: 2214 - DNA, 20 bp, Artificial Sequence
  Description of Artificial Sequence: Synthetic oligonucleotide
gtactgaaggaaagaagtca

SEQ ID NO: 2215 - DNA, 20 bp, Artificial Sequence
  Description of Artificial Sequence: Synthetic oligonucleotide
gtagaagaataaagaccagt

SEQ ID NO: 2216 - DNA, 21 bp, Artificial Sequence
  Description of Artificial Sequence: Synthetic oligonucleotide
gtaggagctggagcattcggg

SEQ ID NO: 2217 - DNA, 20 bp, Artificial Sequence
  Description of Artificial Sequence: Synthetic oligonucleotide
gtaggcccacttacagttaa

SEQ ID NO: 2218 - DNA, 20 bp, Artificial Sequence
  Description of Artificial Sequence: Synthetic oligonucleotide
gtagtatgccctgagcctga

SEQ ID NO: 2219 - DNA, 20 bp, Artificial Sequence
  Description of Artificial Sequence: Synthetic oligonucleotide
gtagtcagttatgtcaacac

SEQ ID NO: 2220 - DNA, 20 bp, Artificial Sequence
  Description of Artificial Sequence: Synthetic oligonucleotide
gtagtcatgcaggttcggca

SEQ ID NO: 2221 - DNA, 20 bp, Artificial Sequence
  Description of Artificial Sequence: Synthetic oligonucleotide
gtagtcggaacagggtttac

SEQ ID NO: 2222 - DNA, 20 bp, Artificial Sequence
  Description of Artificial Sequence: Synthetic oligonucleotide
gtagttccccctagaaaatt

SEQ ID NO: 2223 - DNA, 20 bp, Artificial Sequence
  Description of Artificial Sequence: Synthetic oligonucleotide
gtagtttccggaagtgttga

SEQ ID NO: 2224 - DNA, 20 bp, Artificial Sequence
  Description of Artificial Sequence: Synthetic oligonucleotide
gtatctagaagatctcgtac

SEQ ID NO: 2225 - DNA, 20 bp, Artificial Sequence
  Description of Artificial Sequence: Synthetic oligonucleotide
gtatgatgtgttcttgtggc

SEQ ID NO: 2226 - DNA, 20 bp, Artificial Sequence
  Description of Artificial Sequence: Synthetic oligonucleotide
gtatgcatgtattcaatcta

SEQ ID NO: 2227 - DNA, 20 bp, Artificial Sequence
  Description of Artificial Sequence: Synthetic oligonucleotide
gtatggatcggcagaggagc

SEQ ID NO: 2228 - DNA, 20 bp, Artificial Sequence
  Description of Artificial Sequence: Synthetic oligonucleotide
gtattaaaccttattatcca

SEQ ID NO: 2229 - DNA, 20 bp, Artificial Sequence
  Description of Artificial Sequence: Synthetic oligonucleotide
gtattcccatcccatcatcc

SEQ ID NO: 2230 - DNA, 21 bp, Artificial Sequence
  Description of Artificial Sequence: Synthetic oligonucleotide
gtatttggtgtctttcggagt

SEQ ID NO: 2231 - DNA, 20 bp, Artificial Sequence
  Description of Artificial Sequence: Synthetic oligonucleotide
gtcaacactaatatgggcct

SEQ ID NO: 2232 - DNA, 20 bp, Artificial Sequence
  Description of Artificial Sequence: Synthetic oligonucleotide
gtcaatcttctcgaggattg

SEQ ID NO: 2233 - DNA, 20 bp, Artificial Sequence
  Description of Artificial Sequence: Synthetic oligonucleotide
gtcattagttccccccagca

SEQ ID NO: 2234 - DNA, 20 bp, Artificial Sequence
  Description of Artificial Sequence: Synthetic oligonucleotide
gtccagaagaaccaacaaga

SEQ ID NO: 2235 - DNA, 20 bp, Artificial Sequence
  Description of Artificial Sequence: Synthetic oligonucleotide
gtcccaagcgaccccgagaa

SEQ ID NO: 2236 - DNA, 20 bp, Artificial Sequence
  Description of Artificial Sequence: Synthetic oligonucleotide
gtcccgataatgtttgctcc

SEQ ID NO: 2237 - DNA, 20 bp, Artificial Sequence
  Description of Artificial Sequence: Synthetic oligonucleotide
gtcccgcgcaggatccagtt

SEQ ID NO: 2238 - DNA, 20 bp, Artificial Sequence
  Description of Artificial Sequence: Synthetic oligonucleotide
gtccggcagatgagaaggca

SEQ ID NO: 2239 - DNA, 20 bp, Artificial Sequence
  Description of Artificial Sequence: Synthetic oligonucleotide
gtcctactgttcaagcctcc

SEQ ID NO: 2240 - DNA, 20 bp, Artificial Sequence
  Description of Artificial Sequence: Synthetic oligonucleotide
gtcctcttatgtaagacctt

SEQ ID NO: 2241 - DNA, 20 bp, Artificial Sequence
  Description of Artificial Sequence: Synthetic oligonucleotide
gtcggaacggcagacggaga

SEQ ID NO: 2242 - DNA, 20 bp, Artificial Sequence
  Description of Artificial Sequence: Synthetic oligonucleotide
gtcggtcggaacggcagacg

SEQ ID NO: 2243 - DNA, 20 bp, Artificial Sequence
  Description of Artificial Sequence: Synthetic oligonucleotide
gtcggtcgttgacattgcag

SEQ ID NO: 2244 - DNA, 20 bp, Artificial Sequence
  Description of Artificial Sequence: Synthetic oligonucleotide
gtctaacaacagtagtttcc

SEQ ID NO: 2245 - DNA, 20 bp, Artificial Sequence
  Description of Artificial Sequence: Synthetic oligonucleotide
gtctataagctggaggagtg

SEQ ID NO: 2246 - DNA, 20 bp, Artificial Sequence
  Description of Artificial Sequence: Synthetic oligonucleotide
gtctgcgcaccagcaccatg

SEQ ID NO: 2247 - DNA, 20 bp, Artificial Sequence
  Description of Artificial Sequence: Synthetic oligonucleotide
gtctggagcaaacattatcg

SEQ ID NO: 2248 - DNA, 20 bp, Artificial Sequence
  Description of Artificial Sequence: Synthetic oligonucleotide
gtctggcgattggtggaggc

SEQ ID NO: 2249 - DNA, 20 bp, Artificial Sequence
  Description of Artificial Sequence: Synthetic oligonucleotide
gtcttacataagaggactct

SEQ ID NO: 2250 - DNA, 20 bp, Artificial Sequence
  Description of Artificial Sequence: Synthetic oligonucleotide
gtcttggtgtaaatgtatat

SEQ ID NO: 2251 - DNA, 20 bp, Artificial Sequence
  Description of Artificial Sequence: Synthetic oligonucleotide
gtctttaaacaaacagtctt

SEQ ID NO: 2252 - DNA, 21 bp, Artificial Sequence
  Description of Artificial Sequence: Synthetic oligonucleotide
gtctttgaagtatgcctcaag

SEQ ID NO: 2253 - DNA, 20 bp, Artificial Sequence
  Description of Artificial Sequence: Synthetic oligonucleotide
gtctttgtactaggaggctg

SEQ ID NO: 2254 - DNA, 20 bp, Artificial Sequence
  Description of Artificial Sequence: Synthetic oligonucleotide
gtgagaggcctgtatttccc

SEQ ID NO: 2255 - DNA, 21 bp, Artificial Sequence
  Description of Artificial Sequence: Synthetic oligonucleotide
gtgagaggcctgtatttccct

SEQ ID NO: 2256 - DNA, 20 bp, Artificial Sequence
  Description of Artificial Sequence: Synthetic oligonucleotide
gtgaggtgaacaatgctcag

SEQ ID NO: 2257 - DNA, 20 bp, Artificial Sequence
  Description of Artificial Sequence: Synthetic oligonucleotide
gtgatgttctccatgttcag

SEQ ID NO: 2258 - DNA, 20 bp, Artificial Sequence
  Description of Artificial Sequence: Synthetic oligonucleotide
gtgcacacggtccggcagat

SEQ ID NO: 2259 - DNA, 20 bp, Artificial Sequence
  Description of Artificial Sequence: Synthetic oligonucleotide
gtgcagtatggtgaggtgaa

SEQ ID NO: 2260 - DNA, 20 bp, Artificial Sequence
  Description of Artificial Sequence: Synthetic oligonucleotide
gtgcgccccgtggtcggtcg

SEQ ID NO: 2261 - DNA, 20 bp, Artificial Sequence
  Description of Artificial Sequence: Synthetic oligonucleotide
gtgctggtggttgaggatcc

SEQ ID NO: 2262 - DNA, 20 bp, Artificial Sequence
  Description of Artificial Sequence: Synthetic oligonucleotide
gtggagacagcggggtaggc

SEQ ID NO: 2263 - DNA, 20 bp, Artificial Sequence
  Description of Artificial Sequence: Synthetic oligonucleotide
gtggaggcaggaggcggatt

SEQ ID NO: 2264 - DNA, 20 bp, Artificial Sequence
  Description of Artificial Sequence: Synthetic oligonucleotide
gtgggtcaccatattcttgg

SEQ ID NO: 2265 - DNA, 20 bp, Artificial Sequence
  Description of Artificial Sequence: Synthetic oligonucleotide
gtgggtcttttgggttttgc

SEQ ID NO: 2266 - DNA, 20 bp, Artificial Sequence
  Description of Artificial Sequence: Synthetic oligonucleotide
gtggtcgggaaagaatccca

SEQ ID NO: 2267 - DNA, 20 bp, Artificial Sequence
  Description of Artificial Sequence: Synthetic oligonucleotide
gtggttgaggatcctggaat

SEQ ID NO: 2268 - DNA, 20 bp, Artificial Sequence
  Description of Artificial Sequence: Synthetic oligonucleotide
gtgtaaatagtgtctagttt

SEQ ID NO: 2269 - DNA, 20 bp, Artificial Sequence
  Description of Artificial Sequence: Synthetic oligonucleotide
gtgtaaatgtatattaggaa

SEQ ID NO: 2270 - DNA, 20 bp, Artificial Sequence
  Description of Artificial Sequence: Synthetic oligonucleotide
gtgttgacataactgactac

SEQ ID NO: 2271 - DNA, 20 bp, Artificial Sequence
  Description of Artificial Sequence: Synthetic oligonucleotide
gtgtttctcaaaggtggaga

SEQ ID NO: 2272 - DNA, 20 bp, Artificial Sequence
  Description of Artificial Sequence: Synthetic oligonucleotide
gttaccaaatatttaccatt

SEQ ID NO: 2273 - DNA, 20 bp, Artificial Sequence
  Description of Artificial Sequence: Synthetic oligonucleotide
gttatgggtccttgccacaa

SEQ ID NO: 2274 - DNA, 20 bp, Artificial Sequence
  Description of Artificial Sequence: Synthetic oligonucleotide
gttatgtcaacactaatatg

SEQ ID NO: 2275 - DNA, 20 bp, Artificial Sequence
  Description of Artificial Sequence: Synthetic oligonucleotide
gttatgtcattggaagttat

SEQ ID NO: 2276 - DNA, 21 bp, Artificial Sequence
  Description of Artificial Sequence: Synthetic oligonucleotide
gttcacattttttgataatgt

SEQ ID NO: 2277 - DNA, 20 bp, Artificial Sequence
  Description of Artificial Sequence: Synthetic oligonucleotide
gttcaggtattgtttacaca

SEQ ID NO: 2278 - DNA, 20 bp, Artificial Sequence
  Description of Artificial Sequence: Synthetic oligonucleotide
gttccccaccttatgagtcc

SEQ ID NO: 2279 - DNA, 21 bp, Artificial Sequence
  Description of Artificial Sequence: Synthetic oligonucleotide
gttccccaccttatgagtcca

SEQ ID NO: 2280 - DNA, 20 bp, Artificial Sequence
  Description of Artificial Sequence: Synthetic oligonucleotide
gttccccctagaaaattgag

SEQ ID NO: 2281 - DNA, 20 bp, Artificial Sequence
  Description of Artificial Sequence: Synthetic oligonucleotide
gttcttgtggcaaggaccca

SEQ ID NO: 2282 - DNA, 20 bp, Artificial Sequence
  Description of Artificial Sequence: Synthetic oligonucleotide
gttgacattgcagagagtcc

SEQ ID NO: 2283 - DNA, 20 bp, Artificial Sequence
  Description of Artificial Sequence: Synthetic oligonucleotide
gttgaggatcctggaattag

SEQ ID NO: 2284 - DNA, 20 bp, Artificial Sequence
  Description of Artificial Sequence: Synthetic oligonucleotide
gttgataggataggggcatt

SEQ ID NO: 2285 - DNA, 21 bp, Artificial Sequence
  Description of Artificial Sequence: Synthetic oligonucleotide
gttgataggataggggcattt

SEQ ID NO: 2286 - DNA, 20 bp, Artificial Sequence
  Description of Artificial Sequence: Synthetic oligonucleotide
gttgcatggtgctggtgcgc

SEQ ID NO: 2287 - DNA, 20 bp, Artificial Sequence
  Description of Artificial Sequence: Synthetic oligonucleotide
gttgcccaaggtcttacata

SEQ ID NO: 2288 - DNA, 20 bp, Artificial Sequence
  Description of Artificial Sequence: Synthetic oligonucleotide
gttgccgggcaacggggtaa

SEQ ID NO: 2289 - DNA, 20 bp, Artificial Sequence
  Description of Artificial Sequence: Synthetic oligonucleotide
gttggaggacaggaggttgg

SEQ ID NO: 2290 - DNA, 20 bp, Artificial Sequence
  Description of Artificial Sequence: Synthetic oligonucleotide
gttggatccagccttcagag

SEQ ID NO: 2291 - DNA, 20 bp, Artificial Sequence
  Description of Artificial Sequence: Synthetic oligonucleotide
gttgggggaggagattagat

SEQ ID NO: 2292 - DNA, 21 bp, Artificial Sequence
  Description of Artificial Sequence: Synthetic oligonucleotide
gttgggggaggagattagatt

SEQ ID NO: 2293 - DNA, 20 bp, Artificial Sequence
  Description of Artificial Sequence: Synthetic oligonucleotide
gttggttcttctggactatc

SEQ ID NO: 2294 - DNA, 20 bp, Artificial Sequence
  Description of Artificial Sequence: Synthetic oligonucleotide
gtttaaagactgggaggagt

SEQ ID NO: 2295 - DNA, 21 bp, Artificial Sequence
  Description of Artificial Sequence: Synthetic oligonucleotide
gtttaatacccttatccaatg

SEQ ID NO: 2296 - DNA, 20 bp, Artificial Sequence
  Description of Artificial Sequence: Synthetic oligonucleotide
gtttacacagaaaggccttg

SEQ ID NO: 2297 - DNA, 20 bp, Artificial Sequence
  Description of Artificial Sequence: Synthetic oligonucleotide
gtttactgctcctgaactgg

SEQ ID NO: 2298 - DNA, 20 bp, Artificial Sequence
  Description of Artificial Sequence: Synthetic oligonucleotide
gtttcaccccaccgcacgga

SEQ ID NO: 2299 - DNA, 21 bp, Artificial Sequence
  Description of Artificial Sequence: Synthetic oligonucleotide
gtttctcaaaggtggagacag

SEQ ID NO: 2300 - DNA, 20 bp, Artificial Sequence
  Description of Artificial Sequence: Synthetic oligonucleotide
gtttgctccagacctgctgc

SEQ ID NO: 2301 - DNA, 20 bp, Artificial Sequence
  Description of Artificial Sequence: Synthetic oligonucleotide
gtttggaagtaatgattaac

SEQ ID NO: 2302 - DNA, 20 bp, Artificial Sequence
  Description of Artificial Sequence: Synthetic oligonucleotide
gtttggtacagcaacaggag

SEQ ID NO: 2303 - DNA, 20 bp, Artificial Sequence
  Description of Artificial Sequence: Synthetic oligonucleotide
gtttgtttaaagactgggag

SEQ ID NO: 2304 - DNA, 20 bp, Artificial Sequence
  Description of Artificial Sequence: Synthetic oligonucleotide
gttttgctcgcagcaggtct

SEQ ID NO: 2305 - DNA, 20 bp, Artificial Sequence
  Description of Artificial Sequence: Synthetic oligonucleotide
gttttgctgccccatttaca

SEQ ID NO: 2306 - DNA, 20 bp, Artificial Sequence
  Description of Artificial Sequence: Synthetic oligonucleotide
taaaacctagcaggcataat

SEQ ID NO: 2307 - DNA, 20 bp, Artificial Sequence
  Description of Artificial Sequence: Synthetic oligonucleotide
taaaccctaacaaaacaaag

SEQ ID NO: 2308 - DNA, 21 bp, Artificial Sequence
  Description of Artificial Sequence: Synthetic oligonucleotide
taaaccttattatccagaaca

SEQ ID NO: 2309 - DNA, 20 bp, Artificial Sequence
  Description of Artificial Sequence: Synthetic oligonucleotide
taaactgagccaggagaaac

SEQ ID NO: 2310 - DNA, 20 bp, Artificial Sequence
  Description of Artificial Sequence: Synthetic oligonucleotide
taaagacaggtacagtagaa

SEQ ID NO: 2311 - DNA, 20 bp, Artificial Sequence
  Description of Artificial Sequence: Synthetic oligonucleotide
taaagactgggaggagttgg

SEQ ID NO: 2312 - DNA, 21 bp, Artificial Sequence
  Description of Artificial Sequence: Synthetic oligonucleotide
taaagagaggtgcgccccgtg

SEQ ID NO: 2313 - DNA, 20 bp, Artificial Sequence
  Description of Artificial Sequence: Synthetic oligonucleotide
taaaggtctttgtactagga

SEQ ID NO: 2314 - DNA, 20 bp, Artificial Sequence
  Description of Artificial Sequence: Synthetic oligonucleotide
taaagttcaggcaactcttg

SEQ ID NO: 2315 - DNA, 20 bp, Artificial Sequence
  Description of Artificial Sequence: Synthetic oligonucleotide
taaatggggcagcaaaaccc

SEQ ID NO: 2316 - DNA, 20 bp, Artificial Sequence
  Description of Artificial Sequence: Synthetic oligonucleotide
taaatgtatacccaaagaca

SEQ ID NO: 2317 - DNA, 20 bp, Artificial Sequence
  Description of Artificial Sequence: Synthetic oligonucleotide
taacacccacccaggtagct

SEQ ID NO: 2318 - DNA, 20 bp, Artificial Sequence
  Description of Artificial Sequence: Synthetic oligonucleotide
taacacgagaaggggtccta

SEQ ID NO: 2319 - DNA, 21 bp, Artificial Sequence
  Description of Artificial Sequence: Synthetic oligonucleotide
taacagcggtaaaaagggact

SEQ ID NO: 2320 - DNA, 20 bp, Artificial Sequence
  Description of Artificial Sequence: Synthetic oligonucleotide
taacaggcctattgattgga

SEQ ID NO: 2321 - DNA, 21 bp, Artificial Sequence
  Description of Artificial Sequence: Synthetic oligonucleotide
taacattgaggttcccgagat

SEQ ID NO: 2322 - DNA, 20 bp, Artificial Sequence
  Description of Artificial Sequence: Synthetic oligonucleotide
taaccacattgtgtaaatgg

SEQ ID NO: 2323 - DNA, 20 bp, Artificial Sequence
  Description of Artificial Sequence: Synthetic oligonucleotide
taactagatgttctggataa

SEQ ID NO: 2324 - DNA, 20 bp, Artificial Sequence
  Description of Artificial Sequence: Synthetic oligonucleotide
taactgaaagccaaacagtg

SEQ ID NO: 2325 - DNA, 20 bp, Artificial Sequence
  Description of Artificial Sequence: Synthetic oligonucleotide
taactgactactaggtctct

SEQ ID NO: 2326 - DNA, 21 bp, Artificial Sequence
  Description of Artificial Sequence: Synthetic oligonucleotide
taagaggactcttggactctc

SEQ ID NO: 2327 - DNA, 20 bp, Artificial Sequence
  Description of Artificial Sequence: Synthetic oligonucleotide
taagggagaggcagtagtcg

SEQ ID NO: 2328 - DNA, 20 bp, Artificial Sequence
  Description of Artificial Sequence: Synthetic oligonucleotide
taaggtttaatacccttatc

SEQ ID NO: 2329 - DNA, 21 bp, Artificial Sequence
  Description of Artificial Sequence: Synthetic oligonucleotide
taaggtttaatacccttatcc

SEQ ID NO: 2330 - DNA, 20 bp, Artificial Sequence
  Description of Artificial Sequence: Synthetic oligonucleotide
taagttggcgagaaagtgaa

SEQ ID NO: 2331 - DNA, 21 bp, Artificial Sequence
  Description of Artificial Sequence: Synthetic oligonucleotide
taataaggtttaataccctta

SEQ ID NO: 2332 - DNA, 20 bp, Artificial Sequence
  Description of Artificial Sequence: Synthetic oligonucleotide
taatacccttatccaatggt

SEQ ID NO: 2333 - DNA, 20 bp, Artificial Sequence
  Description of Artificial Sequence: Synthetic oligonucleotide
taatatacccgccttccata

SEQ ID NO: 2334 - DNA, 20 bp, Artificial Sequence
  Description of Artificial Sequence: Synthetic oligonucleotide
taatatgggcctaaagttca

SEQ ID NO: 2335 - DNA, 21 bp, Artificial Sequence
  Description of Artificial Sequence: Synthetic oligonucleotide
taatctcctcccccaactcct

SEQ ID NO: 2336 - DNA, 21 bp, Artificial Sequence
  Description of Artificial Sequence: Synthetic oligonucleotide
taatgagaaaagaagattgca

SEQ ID NO: 2337 - DNA, 20 bp, Artificial Sequence
  Description of Artificial Sequence: Synthetic oligonucleotide
taatgattaactagatgttc

SEQ ID NO: 2338 - DNA, 21 bp, Artificial Sequence
  Description of Artificial Sequence: Synthetic oligonucleotide
taatgcccttgtatgcatgta

SEQ ID NO: 2339 - DNA, 20 bp, Artificial Sequence
  Description of Artificial Sequence: Synthetic oligonucleotide
tacaaactgttcacattttt

SEQ ID NO: 2340 - DNA, 21 bp, Artificial Sequence
  Description of Artificial Sequence: Synthetic oligonucleotide
tacaaactgttcacatttttt

SEQ ID NO: 2341 - DNA, 20 bp, Artificial Sequence
  Description of Artificial Sequence: Synthetic oligonucleotide
tacagagctgaggcggtatc

SEQ ID NO: 2342 - DNA, 20 bp, Artificial Sequence
  Description of Artificial Sequence: Synthetic oligonucleotide
tacaggtgcaatttccgtcc

SEQ ID NO: 2343 - DNA, 20 bp, Artificial Sequence
  Description of Artificial Sequence: Synthetic oligonucleotide
tacagtagaagaataaagac

SEQ ID NO: 2344 - DNA, 20 bp, Artificial Sequence
  Description of Artificial Sequence: Synthetic oligonucleotide
tacatcgtatccatggctgc

SEQ ID NO: 2345 - DNA, 20 bp, Artificial Sequence
  Description of Artificial Sequence: Synthetic oligonucleotide
taccaattttcttttgtctt

SEQ ID NO: 2346 - DNA, 20 bp, Artificial Sequence
  Description of Artificial Sequence: Synthetic oligonucleotide
taccattggataagggtatt

SEQ ID NO: 2347 - DNA, 20 bp, Artificial Sequence
  Description of Artificial Sequence: Synthetic oligonucleotide
taccccgctgtctccacctt

SEQ ID NO: 2348 - DNA, 21 bp, Artificial Sequence
  Description of Artificial Sequence: Synthetic oligonucleotide
taccccgttgcccggcaacgg

SEQ ID NO: 2349 - DNA, 21 bp, Artificial Sequence
  Description of Artificial Sequence: Synthetic oligonucleotide
tacccgccttccatagagtgt

SEQ ID NO: 2350 - DNA, 20 bp, Artificial Sequence
  Description of Artificial Sequence: Synthetic oligonucleotide
taccgcctcagctctgtatc

SEQ ID NO: 2351 - DNA, 20 bp, Artificial Sequence
  Description of Artificial Sequence: Synthetic oligonucleotide
tacctgaacctttaccccgt

SEQ ID NO: 2352 - DNA, 20 bp, Artificial Sequence
  Description of Artificial Sequence: Synthetic oligonucleotide
tacctgggtgggtgttaatt

SEQ ID NO: 2353 - DNA, 20 bp, Artificial Sequence
  Description of Artificial Sequence: Synthetic oligonucleotide
tacctgtctttaatcctcat

SEQ ID NO: 2354 - DNA, 20 bp, Artificial Sequence
  Description of Artificial Sequence: Synthetic oligonucleotide
taccttgttggcgtctggcc

SEQ ID NO: 2355 - DNA, 20 bp, Artificial Sequence
  Description of Artificial Sequence: Synthetic oligonucleotide
tacgatgtatatttgcggga

SEQ ID NO: 2356 - DNA, 20 bp, Artificial Sequence
  Description of Artificial Sequence: Synthetic oligonucleotide
tactaggaggctgtaggcat

SEQ ID NO: 2357 - DNA, 20 bp, Artificial Sequence
  Description of Artificial Sequence: Synthetic oligonucleotide
tactgaaggaaagaagtcag

SEQ ID NO: 2358 - DNA, 20 bp, Artificial Sequence
  Description of Artificial Sequence: Synthetic oligonucleotide
tactgcctctcccttatcgt

SEQ ID NO: 2359 - DNA, 20 bp, Artificial Sequence
  Description of Artificial Sequence: Synthetic oligonucleotide
tacttcaaagactgtttgtt

SEQ ID NO: 2360 - DNA, 20 bp, Artificial Sequence
  Description of Artificial Sequence: Synthetic oligonucleotide
tagaaaacttcctattaaca

SEQ ID NO: 2361 - DNA, 20 bp, Artificial Sequence
  Description of Artificial Sequence: Synthetic oligonucleotide
tagaagaataaagaccagta

SEQ ID NO: 2362 - DNA, 20 bp, Artificial Sequence
  Description of Artificial Sequence: Synthetic oligonucleotide
tagaagatctcgtactgaag

SEQ ID NO: 2363 - DNA, 20 bp, Artificial Sequence
  Description of Artificial Sequence: Synthetic oligonucleotide
tagactctgcggtattgtga

SEQ ID NO: 2364 - DNA, 20 bp, Artificial Sequence
  Description of Artificial Sequence: Synthetic oligonucleotide
tagagtatttggtgtctttc

SEQ ID NO: 2365 - DNA, 20 bp, Artificial Sequence
  Description of Artificial Sequence: Synthetic oligonucleotide
tagagtcattagttcccccc

SEQ ID NO: 2366 - DNA, 20 bp, Artificial Sequence
  Description of Artificial Sequence: Synthetic oligonucleotide
tagagtgtgtaaatagtgtc

SEQ ID NO: 2367 - DNA, 21 bp, Artificial Sequence
  Description of Artificial Sequence: Synthetic oligonucleotide
tagatgttctggataataagg

SEQ ID NO: 2368 - DNA, 20 bp, Artificial Sequence
  Description of Artificial Sequence: Synthetic oligonucleotide
tagattaaaggtctttgtac

SEQ ID NO: 2369 - DNA, 20 bp, Artificial Sequence
  Description of Artificial Sequence: Synthetic oligonucleotide
tagattgaatacatgcatac

SEQ ID NO: 2370 - DNA, 20 bp, Artificial Sequence
  Description of Artificial Sequence: Synthetic oligonucleotide
tagcagcaggatgaagagga

SEQ ID NO: 2371 - DNA, 20 bp, Artificial Sequence
  Description of Artificial Sequence: Synthetic oligonucleotide
tagctccaaattctttataa

SEQ ID NO: 2372 - DNA, 20 bp, Artificial Sequence
  Description of Artificial Sequence: Synthetic oligonucleotide
taggaaaagatggtgttttc

SEQ ID NO: 2373 - DNA, 20 bp, Artificial Sequence
  Description of Artificial Sequence: Synthetic oligonucleotide
taggaattttccgaaagccc

SEQ ID NO: 2374 - DNA, 20 bp, Artificial Sequence
  Description of Artificial Sequence: Synthetic oligonucleotide
taggaccccttctcgtgtta

SEQ ID NO: 2375 - DNA, 20 bp, Artificial Sequence
  Description of Artificial Sequence: Synthetic oligonucleotide
taggcccacttacagttaat

SEQ ID NO: 2376 - DNA, 20 bp, Artificial Sequence
  Description of Artificial Sequence: Synthetic oligonucleotide
taggctgccttcctgtctgg

SEQ ID NO: 2377 - DNA, 20 bp, Artificial Sequence
  Description of Artificial Sequence: Synthetic oligonucleotide
taggggcatttggtggtcta

SEQ ID NO: 2378 - DNA, 20 bp, Artificial Sequence
  Description of Artificial Sequence: Synthetic oligonucleotide
tagggtttaaatgtataccc

SEQ ID NO: 2379 - DNA, 20 bp, Artificial Sequence
  Description of Artificial Sequence: Synthetic oligonucleotide
tagtacaaagacctttaatc

SEQ ID NO: 2380 - DNA, 20 bp, Artificial Sequence
  Description of Artificial Sequence: Synthetic oligonucleotide
tagtatgccctgagcctgag

SEQ ID NO: 2381 - DNA, 20 bp, Artificial Sequence
  Description of Artificial Sequence: Synthetic oligonucleotide
tagtccagaagaaccaacaa

SEQ ID NO: 2382 - DNA, 21 bp, Artificial Sequence
  Description of Artificial Sequence: Synthetic oligonucleotide
tagtgttgacataactgacta

SEQ ID NO: 2383 - DNA, 20 bp, Artificial Sequence
  Description of Artificial Sequence: Synthetic oligonucleotide
tagttccccctagaaaattg

SEQ ID NO: 2384 - DNA, 20 bp, Artificial Sequence
  Description of Artificial Sequence: Synthetic oligonucleotide
tagtttccggaagtgttgat

SEQ ID NO: 2385 - DNA, 21 bp, Artificial Sequence
  Description of Artificial Sequence: Synthetic oligonucleotide
tagtttggaagtaatgattaa

SEQ ID NO: 2386 - DNA, 20 bp, Artificial Sequence
  Description of Artificial Sequence: Synthetic oligonucleotide
tataacggtttctcttccaa

SEQ ID NO: 2387 - DNA, 20 bp, Artificial Sequence
  Description of Artificial Sequence: Synthetic oligonucleotide
tataactgaaagccaaacag

SEQ ID NO: 2388 - DNA, 20 bp, Artificial Sequence
  Description of Artificial Sequence: Synthetic oligonucleotide
tataagagagaaacaacaca

SEQ ID NO: 2389 - DNA, 20 bp, Artificial Sequence
  Description of Artificial Sequence: Synthetic oligonucleotide
tataatatacccgccttcca

SEQ ID NO: 2390 - DNA, 21 bp, Artificial Sequence
  Description of Artificial Sequence: Synthetic oligonucleotide
tatagagtatttggtgtcttt

SEQ ID NO: 2391 - DNA, 20 bp, Artificial Sequence
  Description of Artificial Sequence: Synthetic oligonucleotide
tatattatataagagagaaa

SEQ ID NO: 2392 - DNA, 21 bp, Artificial Sequence
  Description of Artificial Sequence: Synthetic oligonucleotide
tatatttgcgggagaggacaa

SEQ ID NO: 2393 - DNA, 20 bp, Artificial Sequence
  Description of Artificial Sequence: Synthetic oligonucleotide
tatcatcttcctcttcatcc

SEQ ID NO: 2394 - DNA, 20 bp, Artificial Sequence
  Description of Artificial Sequence: Synthetic oligonucleotide
tatccatggctgctaggctg

SEQ ID NO: 2395 - DNA, 20 bp, Artificial Sequence
  Description of Artificial Sequence: Synthetic oligonucleotide
tatccctcctgttgctgtac

SEQ ID NO: 2396 - DNA, 20 bp, Artificial Sequence
  Description of Artificial Sequence: Synthetic oligonucleotide
tatcctatcaacacttccgg

SEQ ID NO: 2397 - DNA, 20 bp, Artificial Sequence
  Description of Artificial Sequence: Synthetic oligonucleotide
tatctagaagatctcgtact

SEQ ID NO: 2398 - DNA, 20 bp, Artificial Sequence
  Description of Artificial Sequence: Synthetic oligonucleotide
tatgatgtgttcttgtggca

SEQ ID NO: 2399 - DNA, 20 bp, Artificial Sequence
  Description of Artificial Sequence: Synthetic oligonucleotide
tatgcctcaaggtcggtcgt

SEQ ID NO: 2400 - DNA, 20 bp, Artificial Sequence
  Description of Artificial Sequence: Synthetic oligonucleotide
tatgcctgctaggttttatc

SEQ ID NO: 2401 - DNA, 21 bp, Artificial Sequence
  Description of Artificial Sequence: Synthetic oligonucleotide
tatgcctgctaggttttatcc

SEQ ID NO: 2402 - DNA, 20 bp, Artificial Sequence
  Description of Artificial Sequence: Synthetic oligonucleotide
tatggatcggcagaggagcc

SEQ ID NO: 2403 - DNA, 20 bp, Artificial Sequence
  Description of Artificial Sequence: Synthetic oligonucleotide
tatggtgacccacaaaatga

SEQ ID NO: 2404 - DNA, 20 bp, Artificial Sequence
  Description of Artificial Sequence: Synthetic oligonucleotide
tatggtgaggtgaacaatgc

SEQ ID NO: 2405 - DNA, 21 bp, Artificial Sequence
  Description of Artificial Sequence: Synthetic oligonucleotide
tatgtaagaccttgggcaaca

SEQ ID NO: 2406 - DNA, 20 bp, Artificial Sequence
  Description of Artificial Sequence: Synthetic oligonucleotide
tatgtatccctcctgttgct

SEQ ID NO: 2407 - DNA, 20 bp, Artificial Sequence
  Description of Artificial Sequence: Synthetic oligonucleotide
tattaacaggcctattgatt

SEQ ID NO: 2408 - DNA, 21 bp, Artificial Sequence
  Description of Artificial Sequence: Synthetic oligonucleotide
tattaacaggcctattgattg

SEQ ID NO: 2409 - DNA, 21 bp, Artificial Sequence
  Description of Artificial Sequence: Synthetic oligonucleotide
tattaggaaaagatggtgttt

SEQ ID NO: 2410 - DNA, 20 bp, Artificial Sequence
  Description of Artificial Sequence: Synthetic oligonucleotide
tattatccagaacatctagt

SEQ ID NO: 2411 - DNA, 20 bp, Artificial Sequence
  Description of Artificial Sequence: Synthetic oligonucleotide
tattcccatcccatcatcct

SEQ ID NO: 2412 - DNA, 21 bp, Artificial Sequence
  Description of Artificial Sequence: Synthetic oligonucleotide
tattcttctactgtacctgtc

SEQ ID NO: 2413 - DNA, 21 bp, Artificial Sequence
  Description of Artificial Sequence: Synthetic oligonucleotide
tattgattggaaagtatgtca

SEQ ID NO: 2414 - DNA, 20 bp, Artificial Sequence
  Description of Artificial Sequence: Synthetic oligonucleotide
tattgggggccaagtctgta

SEQ ID NO: 2415 - DNA, 20 bp, Artificial Sequence
  Description of Artificial Sequence: Synthetic oligonucleotide
tatttacacactctatggaa

SEQ ID NO: 2416 - DNA, 21 bp, Artificial Sequence
  Description of Artificial Sequence: Synthetic oligonucleotide
tatttacacactctatggaag

SEQ ID NO: 2417 - DNA, 20 bp, Artificial Sequence
  Description of Artificial Sequence: Synthetic oligonucleotide
tatttccctgctggtggctc

SEQ ID NO: 2418 - DNA, 20 bp, Artificial Sequence
  Description of Artificial Sequence: Synthetic oligonucleotide
tatttgcgggagaggacaac

SEQ ID NO: 2419 - DNA, 20 bp, Artificial Sequence
  Description of Artificial Sequence: Synthetic oligonucleotide
tatttggtaacctttggata

SEQ ID NO: 2420 - DNA, 20 bp, Artificial Sequence
  Description of Artificial Sequence: Synthetic oligonucleotide
tcaacactaatatgggccta

SEQ ID NO: 2421 - DNA, 20 bp, Artificial Sequence
  Description of Artificial Sequence: Synthetic oligonucleotide
tcaagatgctgtacagactt

SEQ ID NO: 2422 - DNA, 20 bp, Artificial Sequence
  Description of Artificial Sequence: Synthetic oligonucleotide
tcaaggtcggtcgttgacat

SEQ ID NO: 2423 - DNA, 20 bp, Artificial Sequence
  Description of Artificial Sequence: Synthetic oligonucleotide
tcaataggcctgttaatagg

SEQ ID NO: 2424 - DNA, 20 bp, Artificial Sequence
  Description of Artificial Sequence: Synthetic oligonucleotide
tcaatcttctcgaggattgg

SEQ ID NO: 2425 - DNA, 20 bp, Artificial Sequence
  Description of Artificial Sequence: Synthetic oligonucleotide
tcaccatactgcactcaggc

SEQ ID NO: 2426 - DNA, 21 bp, Artificial Sequence
  Description of Artificial Sequence: Synthetic oligonucleotide
tcaccatactgcactcaggca

SEQ ID NO: 2427 - DNA, 20 bp, Artificial Sequence
  Description of Artificial Sequence: Synthetic oligonucleotide
tcacctcaccatactgcact

SEQ ID NO: 2428 - DNA, 20 bp, Artificial Sequence
  Description of Artificial Sequence: Synthetic oligonucleotide
tcacctctgcacgtcgcatg

SEQ ID NO: 2429 - DNA, 21 bp, Artificial Sequence
  Description of Artificial Sequence: Synthetic oligonucleotide
tcactctgggatcttgcagag

SEQ ID NO: 2430 - DNA, 20 bp, Artificial Sequence
  Description of Artificial Sequence: Synthetic oligonucleotide
tcactttctcgccaacttac

SEQ ID NO: 2431 - DNA, 20 bp, Artificial Sequence
  Description of Artificial Sequence: Synthetic oligonucleotide
tcagaaggcaaaaacgagag

SEQ ID NO: 2432 - DNA, 20 bp, Artificial Sequence
  Description of Artificial Sequence: Synthetic oligonucleotide
tcagcccgtttctcctggct

SEQ ID NO: 2433 - DNA, 20 bp, Artificial Sequence
  Description of Artificial Sequence: Synthetic oligonucleotide
tcagggcatactacaaactt

SEQ ID NO: 2434 - DNA, 20 bp, Artificial Sequence
  Description of Artificial Sequence: Synthetic oligonucleotide
tcaggtattgtttacacaga

SEQ ID NO: 2435 - DNA, 20 bp, Artificial Sequence
  Description of Artificial Sequence: Synthetic oligonucleotide
tcattagttccccccagcaa

SEQ ID NO: 2436 - DNA, 20 bp, Artificial Sequence
  Description of Artificial Sequence: Synthetic oligonucleotide
tccaaattctttataagggt

SEQ ID NO: 2437 - DNA, 20 bp, Artificial Sequence
  Description of Artificial Sequence: Synthetic oligonucleotide
tccaactggtggtcgggaaa

SEQ ID NO: 2438 - DNA, 21 bp, Artificial Sequence
  Description of Artificial Sequence: Synthetic oligonucleotide
tccaacttgtcctggttatcg

SEQ ID NO: 2439 - DNA, 20 bp, Artificial Sequence
  Description of Artificial Sequence: Synthetic oligonucleotide
tccaagagtcctcttatgta

SEQ ID NO: 2440 - DNA, 20 bp, Artificial Sequence
  Description of Artificial Sequence: Synthetic oligonucleotide
tccacactccgaaagacacc

SEQ ID NO: 2441 - DNA, 20 bp, Artificial Sequence
  Description of Artificial Sequence: Synthetic oligonucleotide
tccaccccaaaaggcctccg

SEQ ID NO: 2442 - DNA, 20 bp, Artificial Sequence
  Description of Artificial Sequence: Synthetic oligonucleotide
tccagcatctagagacctag

SEQ ID NO: 2443 - DNA, 20 bp, Artificial Sequence
  Description of Artificial Sequence: Synthetic oligonucleotide
tccagccttcagagcaaaca

SEQ ID NO: 2444 - DNA, 20 bp, Artificial Sequence
  Description of Artificial Sequence: Synthetic oligonucleotide
tccagttggcagcacagcct

SEQ ID NO: 2445 - DNA, 20 bp, Artificial Sequence
  Description of Artificial Sequence: Synthetic oligonucleotide
tccatgcgacgtgcagaggt

SEQ ID NO: 2446 - DNA, 20 bp, Artificial Sequence
  Description of Artificial Sequence: Synthetic oligonucleotide
tcccagaggattgctggtgg

SEQ ID NO: 2447 - DNA, 20 bp, Artificial Sequence
  Description of Artificial Sequence: Synthetic oligonucleotide
tcccatcatcctgggctttc

SEQ ID NO: 2448 - DNA, 21 bp, Artificial Sequence
  Description of Artificial Sequence: Synthetic oligonucleotide
tcccatcatcctgggctttcg

SEQ ID NO: 2449 - DNA, 20 bp, Artificial Sequence
  Description of Artificial Sequence: Synthetic oligonucleotide
tccccaccttatgagtccaa

SEQ ID NO: 2450 - DNA, 20 bp, Artificial Sequence
  Description of Artificial Sequence: Synthetic oligonucleotide
tccctgctggtggctccagt

SEQ ID NO: 2451 - DNA, 20 bp, Artificial Sequence
  Description of Artificial Sequence: Synthetic oligonucleotide
tcccttatcgtcaatcttct

SEQ ID NO: 2452 - DNA, 21 bp, Artificial Sequence
  Description of Artificial Sequence: Synthetic oligonucleotide
tcccttatcgtcaatcttctc

SEQ ID NO: 2453 - DNA, 20 bp, Artificial Sequence
  Description of Artificial Sequence: Synthetic oligonucleotide
tccctttttaccgctgttac

SEQ ID NO: 2454 - DNA, 20 bp, Artificial Sequence
  Description of Artificial Sequence: Synthetic oligonucleotide
tccgaaagcccaggatgatg

SEQ ID NO: 2455 - DNA, 20 bp, Artificial Sequence
  Description of Artificial Sequence: Synthetic oligonucleotide
tccgaaggtttggtacagca

SEQ ID NO: 2456 - DNA, 20 bp, Artificial Sequence
  Description of Artificial Sequence: Synthetic oligonucleotide
tccgcaggattcagcgccga

SEQ ID NO: 2457 - DNA, 20 bp, Artificial Sequence
  Description of Artificial Sequence: Synthetic oligonucleotide
tccggaagtgttgataggat

SEQ ID NO: 2458 - DNA, 20 bp, Artificial Sequence
  Description of Artificial Sequence: Synthetic oligonucleotide
tccggcagatgagaaggcac

SEQ ID NO: 2459 - DNA, 20 bp, Artificial Sequence
  Description of Artificial Sequence: Synthetic oligonucleotide
tccgtccgaaggtttggtac

SEQ ID NO: 2460 - DNA, 20 bp, Artificial Sequence
  Description of Artificial Sequence: Synthetic oligonucleotide
tcctaatatacatttacacc

SEQ ID NO: 2461 - DNA, 21 bp, Artificial Sequence
  Description of Artificial Sequence: Synthetic oligonucleotide
tcctaccttgttggcgtctgg

SEQ ID NO: 2462 - DNA, 20 bp, Artificial Sequence
  Description of Artificial Sequence: Synthetic oligonucleotide
tcctactgttcaagcctcca

SEQ ID NO: 2463 - DNA, 21 bp, Artificial Sequence
  Description of Artificial Sequence: Synthetic oligonucleotide
tcctagtacaaagacctttaa

SEQ ID NO: 2464 - DNA, 20 bp, Artificial Sequence
  Description of Artificial Sequence: Synthetic oligonucleotide
tcctccagcttatagaccac

SEQ ID NO: 2465 - DNA, 20 bp, Artificial Sequence
  Description of Artificial Sequence: Synthetic oligonucleotide
tcctcgagaagattgacgat

SEQ ID NO: 2466 - DNA, 20 bp, Artificial Sequence
  Description of Artificial Sequence: Synthetic oligonucleotide
tcctctaattccaggatcct

SEQ ID NO: 2467 - DNA, 20 bp, Artificial Sequence
  Description of Artificial Sequence: Synthetic oligonucleotide
tcctcttatgtaagaccttg

SEQ ID NO: 2468 - DNA, 20 bp, Artificial Sequence
  Description of Artificial Sequence: Synthetic oligonucleotide
tcctgcctccaccaatcgcc

SEQ ID NO: 2469 - DNA, 20 bp, Artificial Sequence
  Description of Artificial Sequence: Synthetic oligonucleotide
tcctgcggacgacccttctc

SEQ ID NO: 2470 - DNA, 20 bp, Artificial Sequence
  Description of Artificial Sequence: Synthetic oligonucleotide
tcctggaattagaggacaaa

SEQ ID NO: 2471 - DNA, 20 bp, Artificial Sequence
  Description of Artificial Sequence: Synthetic oligonucleotide
tcctgtcctccaacttgtcc

SEQ ID NO: 2472 - DNA, 20 bp, Artificial Sequence
  Description of Artificial Sequence: Synthetic oligonucleotide
tcctgtctggcgattggtgg

SEQ ID NO: 2473 - DNA, 20 bp, Artificial Sequence
  Description of Artificial Sequence: Synthetic oligonucleotide
tccttcagtacgagatcttc

SEQ ID NO: 2474 - DNA, 20 bp, Artificial Sequence
  Description of Artificial Sequence: Synthetic oligonucleotide
tccttgagcagtagtcatgc

SEQ ID NO: 2475 - DNA, 20 bp, Artificial Sequence
  Description of Artificial Sequence: Synthetic oligonucleotide
tccttggactcataaggtgg

SEQ ID NO: 2476 - DNA, 20 bp, Artificial Sequence
  Description of Artificial Sequence: Synthetic oligonucleotide
tcctttgtttacgtcccgtc

SEQ ID NO: 2477 - DNA, 20 bp, Artificial Sequence
  Description of Artificial Sequence: Synthetic oligonucleotide
tcgacccttataaagaattt

SEQ ID NO: 2478 - DNA, 20 bp, Artificial Sequence
  Description of Artificial Sequence: Synthetic oligonucleotide
tcgagaagattgacgataag

SEQ ID NO: 2479 - DNA, 20 bp, Artificial Sequence
  Description of Artificial Sequence: Synthetic oligonucleotide
tcggaaaattcctatgggag

SEQ ID NO: 2480 - DNA, 20 bp, Artificial Sequence
  Description of Artificial Sequence: Synthetic oligonucleotide
tcggaacggcagacggagaa

SEQ ID NO: 2481 - DNA, 20 bp, Artificial Sequence
  Description of Artificial Sequence: Synthetic oligonucleotide
tcggcatggtcccgtgctgg

SEQ ID NO: 2482 - DNA, 20 bp, Artificial Sequence
  Description of Artificial Sequence: Synthetic oligonucleotide
tcggcgctgaatcctgcgga

SEQ ID NO: 2483 - DNA, 20 bp, Artificial Sequence
  Description of Artificial Sequence: Synthetic oligonucleotide
tcggtcggaacggcagacgg

SEQ ID NO: 2484 - DNA, 20 bp, Artificial Sequence
  Description of Artificial Sequence: Synthetic oligonucleotide
tcggtcgttgacattgcaga

SEQ ID NO: 2485 - DNA, 20 bp, Artificial Sequence
  Description of Artificial Sequence: Synthetic oligonucleotide
tcgtactgaaggaaagaagt

SEQ ID NO: 2486 - DNA, 20 bp, Artificial Sequence
  Description of Artificial Sequence: Synthetic oligonucleotide
tcgtcaatcttctcgaggat

SEQ ID NO: 2487 - DNA, 20 bp, Artificial Sequence
  Description of Artificial Sequence: Synthetic oligonucleotide
tcgtccgcaggattcagcgc

SEQ ID NO: 2488 - DNA, 20 bp, Artificial Sequence
  Description of Artificial Sequence: Synthetic oligonucleotide
tcgttgacatactttccaat

SEQ ID NO: 2489 - DNA, 20 bp, Artificial Sequence
  Description of Artificial Sequence: Synthetic oligonucleotide
tctaacaacagtagtttccg

SEQ ID NO: 2490 - DNA, 20 bp, Artificial Sequence
  Description of Artificial Sequence: Synthetic oligonucleotide
tctaaggcttcccgatacag

SEQ ID NO: 2491 - DNA, 20 bp, Artificial Sequence
  Description of Artificial Sequence: Synthetic oligonucleotide
tctaattccaggatcctcaa

SEQ ID NO: 2492 - DNA, 20 bp, Artificial Sequence
  Description of Artificial Sequence: Synthetic oligonucleotide
tctagaagatctcgtactga

SEQ ID NO: 2493 - DNA, 20 bp, Artificial Sequence
  Description of Artificial Sequence: Synthetic oligonucleotide
tctagttaatcattacttcc

SEQ ID NO: 2494 - DNA, 20 bp, Artificial Sequence
  Description of Artificial Sequence: Synthetic oligonucleotide
tctagtttggaagtaatgat

SEQ ID NO: 2495 - DNA, 20 bp, Artificial Sequence
  Description of Artificial Sequence: Synthetic oligonucleotide
tctataacggtttctcttcc

SEQ ID NO: 2496 - DNA, 20 bp, Artificial Sequence
  Description of Artificial Sequence: Synthetic oligonucleotide
tctataagctggaggagtgc

SEQ ID NO: 2497 - DNA, 20 bp, Artificial Sequence
  Description of Artificial Sequence: Synthetic oligonucleotide
tctcaaaggtggagacagcg

SEQ ID NO: 2498 - DNA, 20 bp, Artificial Sequence
  Description of Artificial Sequence: Synthetic oligonucleotide
tctcactctgggatcttgca

SEQ ID NO: 2499 - DNA, 20 bp, Artificial Sequence
  Description of Artificial Sequence: Synthetic oligonucleotide
tctccgtctgccgttccgac

SEQ ID NO: 2500 - DNA, 20 bp, Artificial Sequence
  Description of Artificial Sequence: Synthetic oligonucleotide
tctcctcccccaactcctcc

SEQ ID NO: 2501 - DNA, 20 bp, Artificial Sequence
  Description of Artificial Sequence: Synthetic oligonucleotide
tctcctgagcattgttcacc

SEQ ID NO: 2502 - DNA, 20 bp, Artificial Sequence
  Description of Artificial Sequence: Synthetic oligonucleotide
tctctagatgctggatcttc

SEQ ID NO: 2503 - DNA, 20 bp, Artificial Sequence
  Description of Artificial Sequence: Synthetic oligonucleotide
tctctcttatataatatacc

SEQ ID NO: 2504 - DNA, 20 bp, Artificial Sequence
  Description of Artificial Sequence: Synthetic oligonucleotide
tctcttccaaaagtgagaca

SEQ ID NO: 2505 - DNA, 21 bp, Artificial Sequence
  Description of Artificial Sequence: Synthetic oligonucleotide
tctgacttctttccttcagta

SEQ ID NO: 2506 - DNA, 20 bp, Artificial Sequence
  Description of Artificial Sequence: Synthetic oligonucleotide
tctgccgttccgaccgacca

SEQ ID NO: 2507 - DNA, 20 bp, Artificial Sequence
  Description of Artificial Sequence: Synthetic oligonucleotide
tctggactatcaaggtatgt

SEQ ID NO: 2508 - DNA, 21 bp, Artificial Sequence
  Description of Artificial Sequence: Synthetic oligonucleotide
tctggagcaaacattatcggg

SEQ ID NO: 2509 - DNA, 20 bp, Artificial Sequence
  Description of Artificial Sequence: Synthetic oligonucleotide
tctggcgattggtggaggca

SEQ ID NO: 2510 - DNA, 20 bp, Artificial Sequence
  Description of Artificial Sequence: Synthetic oligonucleotide
tctgtgccttctcatctgcc

SEQ ID NO: 2511 - DNA, 20 bp, Artificial Sequence
  Description of Artificial Sequence: Synthetic oligonucleotide
tcttacataagaggactctt

SEQ ID NO: 2512 - DNA, 20 bp, Artificial Sequence
  Description of Artificial Sequence: Synthetic oligonucleotide
tcttccaaaagtgagacaag

SEQ ID NO: 2513 - DNA, 20 bp, Artificial Sequence
  Description of Artificial Sequence: Synthetic oligonucleotide
tcttctactgtacctgtctt

SEQ ID NO: 2514 - DNA, 20 bp, Artificial Sequence
  Description of Artificial Sequence: Synthetic oligonucleotide
tcttcttttctcattaactg

SEQ ID NO: 2515 - DNA, 20 bp, Artificial Sequence
  Description of Artificial Sequence: Synthetic oligonucleotide
tcttggactctctgcaatgt

SEQ ID NO: 2516 - DNA, 20 bp, Artificial Sequence
  Description of Artificial Sequence: Synthetic oligonucleotide
tcttggtgtaaatgtatatt

SEQ ID NO: 2517 - DNA, 20 bp, Artificial Sequence
  Description of Artificial Sequence: Synthetic oligonucleotide
tcttgtctcacttttggaag

SEQ ID NO: 2518 - DNA, 20 bp, Artificial Sequence
  Description of Artificial Sequence: Synthetic oligonucleotide
tctttaaacaaacagtcttt

SEQ ID NO: 2519 - DNA, 20 bp, Artificial Sequence
  Description of Artificial Sequence: Synthetic oligonucleotide
tctttaatcctcattggaaa

SEQ ID NO: 2520 - DNA, 20 bp, Artificial Sequence
  Description of Artificial Sequence: Synthetic oligonucleotide
tctttccaccagcaatcctc

SEQ ID NO: 2521 - DNA, 20 bp, Artificial Sequence
  Description of Artificial Sequence: Synthetic oligonucleotide
tctttgctggggggaactaa

SEQ ID NO: 2522 - DNA, 20 bp, Artificial Sequence
  Description of Artificial Sequence: Synthetic oligonucleotide
tctttgtactaggaggctgt

SEQ ID NO: 2523 - DNA, 20 bp, Artificial Sequence
  Description of Artificial Sequence: Synthetic oligonucleotide
tctttgttttgttagggttt

SEQ ID NO: 2524 - DNA, 20 bp, Artificial Sequence
  Description of Artificial Sequence: Synthetic oligonucleotide
tcttttcctaatatacattt

SEQ ID NO: 2525 - DNA, 20 bp, Artificial Sequence
  Description of Artificial Sequence: Synthetic oligonucleotide
tgaacaagagatgattaggc

SEQ ID NO: 2526 - DNA, 20 bp, Artificial Sequence
  Description of Artificial Sequence: Synthetic oligonucleotide
tgaacagtaggacatgaaca

SEQ ID NO: 2527 - DNA, 20 bp, Artificial Sequence
  Description of Artificial Sequence: Synthetic oligonucleotide
tgaacatggagaacatcaca

SEQ ID NO: 2528 - DNA, 21 bp, Artificial Sequence
  Description of Artificial Sequence: Synthetic oligonucleotide
tgaacatggagaacatcacat

SEQ ID NO: 2529 - DNA, 20 bp, Artificial Sequence
  Description of Artificial Sequence: Synthetic oligonucleotide
tgaacctttaccccgttgcc

SEQ ID NO: 2530 - DNA, 20 bp, Artificial Sequence
  Description of Artificial Sequence: Synthetic oligonucleotide
tgaactggagccaccagcag

SEQ ID NO: 2531 - DNA, 20 bp, Artificial Sequence
  Description of Artificial Sequence: Synthetic oligonucleotide
tgaagaggaagatgataaaa

SEQ ID NO: 2532 - DNA, 20 bp, Artificial Sequence
  Description of Artificial Sequence: Synthetic oligonucleotide
tgaaggctggatccaactgg

SEQ ID NO: 2533 - DNA, 20 bp, Artificial Sequence
  Description of Artificial Sequence: Synthetic oligonucleotide
tgacataacccataaaattc

SEQ ID NO: 2534 - DNA, 21 bp, Artificial Sequence
  Description of Artificial Sequence: Synthetic oligonucleotide
tgacataacccataaaattca

SEQ ID NO: 2535 - DNA, 20 bp, Artificial Sequence
  Description of Artificial Sequence: Synthetic oligonucleotide
tgacatactttccaatcaat

SEQ ID NO: 2536 - DNA, 20 bp, Artificial Sequence
  Description of Artificial Sequence: Synthetic oligonucleotide
tgacattgcagagagtccaa

SEQ ID NO: 2537 - DNA, 20 bp, Artificial Sequence
  Description of Artificial Sequence: Synthetic oligonucleotide
tgaccaagccccagccagtg

SEQ ID NO: 2538 - DNA, 20 bp, Artificial Sequence
  Description of Artificial Sequence: Synthetic oligonucleotide
tgacgataagggagaggcag

SEQ ID NO: 2539 - DNA, 21 bp, Artificial Sequence
  Description of Artificial Sequence: Synthetic oligonucleotide
tgactactaggtctctagatg

SEQ ID NO: 2540 - DNA, 20 bp, Artificial Sequence
  Description of Artificial Sequence: Synthetic oligonucleotide
tgacttctttccttcagtac

SEQ ID NO: 2541 - DNA, 20 bp, Artificial Sequence
  Description of Artificial Sequence: Synthetic oligonucleotide
tgagaaaagaagattgcaat

SEQ ID NO: 2542 - DNA, 20 bp, Artificial Sequence
  Description of Artificial Sequence: Synthetic oligonucleotide
tgagaccttcgtctgcgagg

SEQ ID NO: 2543 - DNA, 20 bp, Artificial Sequence
  Description of Artificial Sequence: Synthetic oligonucleotide
tgaggatgagtgtttctcaa

SEQ ID NO: 2544 - DNA, 20 bp, Artificial Sequence
  Description of Artificial Sequence: Synthetic oligonucleotide
tgaggattcttgtcaacaag

SEQ ID NO: 2545 - DNA, 20 bp, Artificial Sequence
  Description of Artificial Sequence: Synthetic oligonucleotide
tgaggtgaacaatgctcagg

SEQ ID NO: 2546 - DNA, 20 bp, Artificial Sequence
  Description of Artificial Sequence: Synthetic oligonucleotide
tgagtccctttttaccgctg

SEQ ID NO: 2547 - DNA, 20 bp, Artificial Sequence
  Description of Artificial Sequence: Synthetic oligonucleotide
tgagtgcagtatggtgaggt

SEQ ID NO: 2548 - DNA, 21 bp, Artificial Sequence
  Description of Artificial Sequence: Synthetic oligonucleotide
tgagtgcagtatggtgaggtg

SEQ ID NO: 2549 - DNA, 20 bp, Artificial Sequence
  Description of Artificial Sequence: Synthetic oligonucleotide
tgagtgtttctcaaaggtgg

SEQ ID NO: 2550 - DNA, 20 bp, Artificial Sequence
  Description of Artificial Sequence: Synthetic oligonucleotide
tgatagtccagaagaaccaa

SEQ ID NO: 2551 - DNA, 20 bp, Artificial Sequence
  Description of Artificial Sequence: Synthetic oligonucleotide
tgatgggatgggaatacagg

SEQ ID NO: 2552 - DNA, 21 bp, Artificial Sequence
  Description of Artificial Sequence: Synthetic oligonucleotide
tgatgttctccatgttcagcg

SEQ ID NO: 2553 - DNA, 20 bp, Artificial Sequence
  Description of Artificial Sequence: Synthetic oligonucleotide
tgattggaaagtatgtcaac

SEQ ID NO: 2554 - DNA, 20 bp, Artificial Sequence
  Description of Artificial Sequence: Synthetic oligonucleotide
tgcaagatcccagagtgaga

SEQ ID NO: 2555 - DNA, 20 bp, Artificial Sequence
  Description of Artificial Sequence: Synthetic oligonucleotide
tgcacacggtccggcagatg

SEQ ID NO: 2556 - DNA, 20 bp, Artificial Sequence
  Description of Artificial Sequence: Synthetic oligonucleotide
tgcatacaagggcattaacg

SEQ ID NO: 2557 - DNA, 20 bp, Artificial Sequence
  Description of Artificial Sequence: Synthetic oligonucleotide
tgcatgtattcaatctaagc

SEQ ID NO: 2558 - DNA, 20 bp, Artificial Sequence
  Description of Artificial Sequence: Synthetic oligonucleotide
tgcccttgtatgcatgtatt

SEQ ID NO: 2559 - DNA, 20 bp, Artificial Sequence
  Description of Artificial Sequence: Synthetic oligonucleotide
tgccgttccgaccgaccacg

SEQ ID NO: 2560 - DNA, 20 bp, Artificial Sequence
  Description of Artificial Sequence: Synthetic oligonucleotide
tgcctacagcctcctagtac

SEQ ID NO: 2561 - DNA, 20 bp, Artificial Sequence
  Description of Artificial Sequence: Synthetic oligonucleotide
tgcctccaccaatcgccaga

SEQ ID NO: 2562 - DNA, 20 bp, Artificial Sequence
  Description of Artificial Sequence: Synthetic oligonucleotide
tgcctgagtgcagtatggtg

SEQ ID NO: 2563 - DNA, 20 bp, Artificial Sequence
  Description of Artificial Sequence: Synthetic oligonucleotide
tgcctgctaggttttatcca

SEQ ID NO: 2564 - DNA, 20 bp, Artificial Sequence
  Description of Artificial Sequence: Synthetic oligonucleotide
tgcgacgtgcagaggtgaag

SEQ ID NO: 2565 - DNA, 21 bp, Artificial Sequence
  Description of Artificial Sequence: Synthetic oligonucleotide
tgcggtggggtgaaacccagc

SEQ ID NO: 2566 - DNA, 20 bp, Artificial Sequence
  Description of Artificial Sequence: Synthetic oligonucleotide
tgctaggctgtgctgccaac

SEQ ID NO: 2567 - DNA, 20 bp, Artificial Sequence
  Description of Artificial Sequence: Synthetic oligonucleotide
tgctaggttttatccaaagg

SEQ ID NO: 2568 - DNA, 20 bp, Artificial Sequence
  Description of Artificial Sequence: Synthetic oligonucleotide
tgctccagacctgctgcgag

SEQ ID NO: 2569 - DNA, 20 bp, Artificial Sequence
  Description of Artificial Sequence: Synthetic oligonucleotide
tgctcctgaactggagccac

SEQ ID NO: 2570 - DNA, 20 bp, Artificial Sequence
  Description of Artificial Sequence: Synthetic oligonucleotide
tgctcgcagcaggtctggag

SEQ ID NO: 2571 - DNA, 20 bp, Artificial Sequence
  Description of Artificial Sequence: Synthetic oligonucleotide
tgctggcaaagtttgtagta

SEQ ID NO: 2572 - DNA, 20 bp, Artificial Sequence
  Description of Artificial Sequence: Synthetic oligonucleotide
tgctggtggctccagttcag

SEQ ID NO: 2573 - DNA, 20 bp, Artificial Sequence
  Description of Artificial Sequence: Synthetic oligonucleotide
tgctggtggttgaggatcct

SEQ ID NO: 2574 - DNA, 20 bp, Artificial Sequence
  Description of Artificial Sequence: Synthetic oligonucleotide
tgctgtacagacttggcccc

SEQ ID NO: 2575 - DNA, 20 bp, Artificial Sequence
  Description of Artificial Sequence: Synthetic oligonucleotide
tgctgtaccaaaccttcgga

SEQ ID NO: 2576 - DNA, 20 bp, Artificial Sequence
  Description of Artificial Sequence: Synthetic oligonucleotide
tgctgtagatcttgttccca

SEQ ID NO: 2577 - DNA, 20 bp, Artificial Sequence
  Description of Artificial Sequence: Synthetic oligonucleotide
tggaaaacaccatcttttcc

SEQ ID NO: 2578 - DNA, 21 bp, Artificial Sequence
  Description of Artificial Sequence: Synthetic oligonucleotide
tggaaagtatgtcaacgaatt

SEQ ID NO: 2579 - DNA, 20 bp, Artificial Sequence
  Description of Artificial Sequence: Synthetic oligonucleotide
tggaaccttttcggctcctc

SEQ ID NO: 2580 - DNA, 21 bp, Artificial Sequence
  Description of Artificial Sequence: Synthetic oligonucleotide
tggaaccttttcggctcctct

SEQ ID NO: 2581 - DNA, 20 bp, Artificial Sequence
  Description of Artificial Sequence: Synthetic oligonucleotide
tggaaggcgggtatattata

SEQ ID NO: 2582 - DNA, 20 bp, Artificial Sequence
  Description of Artificial Sequence: Synthetic oligonucleotide
tggacatcgacccttataaa

SEQ ID NO: 2583 - DNA, 20 bp, Artificial Sequence
  Description of Artificial Sequence: Synthetic oligonucleotide
tggactctctgcaatgtcaa

SEQ ID NO: 2584 - DNA, 20 bp, Artificial Sequence
  Description of Artificial Sequence: Synthetic oligonucleotide
tggataaaacctagcaggca

SEQ ID NO: 2585 - DNA, 20 bp, Artificial Sequence
  Description of Artificial Sequence: Synthetic oligonucleotide
tggatacgatgtatatttgc

SEQ ID NO: 2586 - DNA, 20 bp, Artificial Sequence
  Description of Artificial Sequence: Synthetic oligonucleotide
tggatccaactggtggtcgg

SEQ ID NO: 2587 - DNA, 20 bp, Artificial Sequence
  Description of Artificial Sequence: Synthetic oligonucleotide
tggatcggcagaggagccga

SEQ ID NO: 2588 - DNA, 20 bp, Artificial Sequence
  Description of Artificial Sequence: Synthetic oligonucleotide
tggatttgctgtgtttgctc

SEQ ID NO: 2589 - DNA, 20 bp, Artificial Sequence
  Description of Artificial Sequence: Synthetic oligonucleotide
tggcaaggacccataacttc

SEQ ID NO: 2590 - DNA, 20 bp, Artificial Sequence
  Description of Artificial Sequence: Synthetic oligonucleotide
tggcactagtaaactgagcc

SEQ ID NO: 2591 - DNA, 21 bp, Artificial Sequence
  Description of Artificial Sequence: Synthetic oligonucleotide
tggcagcacagcctagcagcc

SEQ ID NO: 2592 - DNA, 20 bp, Artificial Sequence
  Description of Artificial Sequence: Synthetic oligonucleotide
tggccagacgccaacaaggt

SEQ ID NO: 2593 - DNA, 20 bp, Artificial Sequence
  Description of Artificial Sequence: Synthetic oligonucleotide
tggcgattggtggaggcagg

SEQ ID NO: 2594 - DNA, 20 bp, Artificial Sequence
  Description of Artificial Sequence: Synthetic oligonucleotide
tggctgctaggctgtgctgc

SEQ ID NO: 2595 - DNA, 20 bp, Artificial Sequence
  Description of Artificial Sequence: Synthetic oligonucleotide
tgggacttcaatcccaacaa

SEQ ID NO: 2596 - DNA, 20 bp, Artificial Sequence
  Description of Artificial Sequence: Synthetic oligonucleotide
tgggatcttgcagagtttgg

SEQ ID NO: 2597 - DNA, 20 bp, Artificial Sequence
  Description of Artificial Sequence: Synthetic oligonucleotide
tgggattctttcccgaccac

SEQ ID NO: 2598 - DNA, 20 bp, Artificial Sequence
  Description of Artificial Sequence: Synthetic oligonucleotide
tgggattgaagtcccaatct

SEQ ID NO: 2599 - DNA, 20 bp, Artificial Sequence
  Description of Artificial Sequence: Synthetic oligonucleotide
tgggccatcagcgcgtgcgt

SEQ ID NO: 2600 - DNA, 20 bp, Artificial Sequence
  Description of Artificial Sequence: Synthetic oligonucleotide
tggggaccctgcgctgaaca

SEQ ID NO: 2601 - DNA, 20 bp, Artificial Sequence
  Description of Artificial Sequence: Synthetic oligonucleotide
tgggggaggagattagatta

SEQ ID NO: 2602 - DNA, 20 bp, Artificial Sequence
  Description of Artificial Sequence: Synthetic oligonucleotide
tggggggaactaatgactct

SEQ ID NO: 2603 - DNA, 20 bp, Artificial Sequence
  Description of Artificial Sequence: Synthetic oligonucleotide
tggggtggagccctcaggct

SEQ ID NO: 2604 - DNA, 21 bp, Artificial Sequence
  Description of Artificial Sequence: Synthetic oligonucleotide
tggggttactctctgaatttt

SEQ ID NO: 2605 - DNA, 20 bp, Artificial Sequence
  Description of Artificial Sequence: Synthetic oligonucleotide
tgggtgggtgttaatttgga

SEQ ID NO: 2606 - DNA, 21 bp, Artificial Sequence
  Description of Artificial Sequence: Synthetic oligonucleotide
tgggttatgtcattggaagtt

SEQ ID NO: 2607 - DNA, 20 bp, Artificial Sequence
  Description of Artificial Sequence: Synthetic oligonucleotide
tgggtttcaccccaccgcac

SEQ ID NO: 2608 - DNA, 21 bp, Artificial Sequence
  Description of Artificial Sequence: Synthetic oligonucleotide
tgggttttgctgccccattta

SEQ ID NO: 2609 - DNA, 20 bp, Artificial Sequence
  Description of Artificial Sequence: Synthetic oligonucleotide
tggtcccgtgctggtggttg

SEQ ID NO: 2610 - DNA, 20 bp, Artificial Sequence
  Description of Artificial Sequence: Synthetic oligonucleotide
tggtcgggaaagaatcccag

SEQ ID NO: 2611 - DNA, 20 bp, Artificial Sequence
  Description of Artificial Sequence: Synthetic oligonucleotide
tggtcggtcggaacggcaga

SEQ ID NO: 2612 - DNA, 20 bp, Artificial Sequence
  Description of Artificial Sequence: Synthetic oligonucleotide
tggtctataagctggaggag

SEQ ID NO: 2613 - DNA, 21 bp, Artificial Sequence
  Description of Artificial Sequence: Synthetic oligonucleotide
tggtctataagctggaggagt

SEQ ID NO: 2614 - DNA, 20 bp, Artificial Sequence
  Description of Artificial Sequence: Synthetic oligonucleotide
tggtctgcgcaccagcacca

SEQ ID NO: 2615 - DNA, 20 bp, Artificial Sequence
  Description of Artificial Sequence: Synthetic oligonucleotide
tggtgacccacaaaatgagg

SEQ ID NO: 2616 - DNA, 20 bp, Artificial Sequence
  Description of Artificial Sequence: Synthetic oligonucleotide
tggtgaggtgaacaatgctc

SEQ ID NO: 2617 - DNA, 20 bp, Artificial Sequence
  Description of Artificial Sequence: Synthetic oligonucleotide
tggtggctccagttcaggag

SEQ ID NO: 2618 - DNA, 20 bp, Artificial Sequence
  Description of Artificial Sequence: Synthetic oligonucleotide
tggtggtcgggaaagaatcc

SEQ ID NO: 2619 - DNA, 20 bp, Artificial Sequence
  Description of Artificial Sequence: Synthetic oligonucleotide
tggtggtctataagctggag

SEQ ID NO: 2620 - DNA, 20 bp, Artificial Sequence
  Description of Artificial Sequence: Synthetic oligonucleotide
tggtgtaaatgtatattagg

SEQ ID NO: 2621 - DNA, 21 bp, Artificial Sequence
  Description of Artificial Sequence: Synthetic oligonucleotide
tggtgtaaatgtatattagga

SEQ ID NO: 2622 - DNA, 20 bp, Artificial Sequence
  Description of Artificial Sequence: Synthetic oligonucleotide
tggtgttttccaatgaggat

SEQ ID NO: 2623 - DNA, 20 bp, Artificial Sequence
  Description of Artificial Sequence: Synthetic oligonucleotide
tggttgaggatcctggaatt

SEQ ID NO: 2624 - DNA, 20 bp, Artificial Sequence
  Description of Artificial Sequence: Synthetic oligonucleotide
tgtaaatagtgtctagtttg

SEQ ID NO: 2625 - DNA, 20 bp, Artificial Sequence
  Description of Artificial Sequence: Synthetic oligonucleotide
tgtaaatgtatattaggaaa

SEQ ID NO: 2626 - DNA, 21 bp, Artificial Sequence
  Description of Artificial Sequence: Synthetic oligonucleotide
tgtaaatgtatattaggaaaa

SEQ ID NO: 2627 - DNA, 20 bp, Artificial Sequence
  Description of Artificial Sequence: Synthetic oligonucleotide
tgtaacacgagaaggggtcc

SEQ ID NO: 2628 - DNA, 21 bp, Artificial Sequence
  Description of Artificial Sequence: Synthetic oligonucleotide
tgtaacacgagaaggggtcct

SEQ ID NO: 2629 - DNA, 21 bp, Artificial Sequence
  Description of Artificial Sequence: Synthetic oligonucleotide
tgtagatcttgttcccaagaa

SEQ ID NO: 2630 - DNA, 20 bp, Artificial Sequence
  Description of Artificial Sequence: Synthetic oligonucleotide
tgtagtatgccctgagcctg

SEQ ID NO: 2631 - DNA, 20 bp, Artificial Sequence
  Description of Artificial Sequence: Synthetic oligonucleotide
tgtatatttgcgggagagga

SEQ ID NO: 2632 - DNA, 20 bp, Artificial Sequence
  Description of Artificial Sequence: Synthetic oligonucleotide
tgtatgatgtgttcttgtgg

SEQ ID NO: 2633 - DNA, 20 bp, Artificial Sequence
  Description of Artificial Sequence: Synthetic oligonucleotide
tgtatgcatgtattcaatct

SEQ ID NO: 2634 - DNA, 20 bp, Artificial Sequence
  Description of Artificial Sequence: Synthetic oligonucleotide
tgtcaacactaatatgggcc

SEQ ID NO: 2635 - DNA, 20 bp, Artificial Sequence
  Description of Artificial Sequence: Synthetic oligonucleotide
tgtcctactgttcaagcctc

SEQ ID NO: 2636 - DNA, 21 bp, Artificial Sequence
  Description of Artificial Sequence: Synthetic oligonucleotide
tgtccttgttgggattgaagt

SEQ ID NO: 2637 - DNA, 20 bp, Artificial Sequence
  Description of Artificial Sequence: Synthetic oligonucleotide
tgtctggcgattggtggagg

SEQ ID NO: 2638 - DNA, 20 bp, Artificial Sequence
  Description of Artificial Sequence: Synthetic oligonucleotide
tgtcttggtgtaaatgtata

SEQ ID NO: 2639 - DNA, 20 bp, Artificial Sequence
  Description of Artificial Sequence: Synthetic oligonucleotide
tgtctttaatcctcattgga

SEQ ID NO: 2640 - DNA, 20 bp, Artificial Sequence
  Description of Artificial Sequence: Synthetic oligonucleotide
tgtctttcggagtgtggatt

SEQ ID NO: 2641 - DNA, 20 bp, Artificial Sequence
  Description of Artificial Sequence: Synthetic oligonucleotide
tgtgggtcaccatattcttg

SEQ ID NO: 2642 - DNA, 20 bp, Artificial Sequence
  Description of Artificial Sequence: Synthetic oligonucleotide
tgtgtaaatagtgtctagtt

SEQ ID NO: 2643 - DNA, 21 bp, Artificial Sequence
  Description of Artificial Sequence: Synthetic oligonucleotide
tgtgtaaatagtgtctagttt

SEQ ID NO: 2644 - DNA, 20 bp, Artificial Sequence
  Description of Artificial Sequence: Synthetic oligonucleotide
tgtgttgtttctctcttata

SEQ ID NO: 2645 - DNA, 20 bp, Artificial Sequence
  Description of Artificial Sequence: Synthetic oligonucleotide
tgttaataggaagttttcta

SEQ ID NO: 2646 - DNA, 20 bp, Artificial Sequence
  Description of Artificial Sequence: Synthetic oligonucleotide
tgttcatgtcctactgttca

SEQ ID NO: 2647 - DNA, 20 bp, Artificial Sequence
  Description of Artificial Sequence: Synthetic oligonucleotide
tgttctccatgttcagcgca

SEQ ID NO: 2648 - DNA, 20 bp, Artificial Sequence
  Description of Artificial Sequence: Synthetic oligonucleotide
tgttgacataactgactact

SEQ ID NO: 2649 - DNA, 20 bp, Artificial Sequence
  Description of Artificial Sequence: Synthetic oligonucleotide
tgttgcccaaggtcttacat

SEQ ID NO: 2650 - DNA, 20 bp, Artificial Sequence
  Description of Artificial Sequence: Synthetic oligonucleotide
tgttgctgtaccaaaccttc

SEQ ID NO: 2651 - DNA, 21 bp, Artificial Sequence
  Description of Artificial Sequence: Synthetic oligonucleotide
tgttgggattgaagtcccaat

SEQ ID NO: 2652 - DNA, 20 bp, Artificial Sequence
  Description of Artificial Sequence: Synthetic oligonucleotide
tgttggttcttctggactat

SEQ ID NO: 2653 - DNA, 20 bp, Artificial Sequence
  Description of Artificial Sequence: Synthetic oligonucleotide
tgtttctcaaaggtggagac

SEQ ID NO: 2654 - DNA, 20 bp, Artificial Sequence
  Description of Artificial Sequence: Synthetic oligonucleotide
tgtttgctccagacctgctg

SEQ ID NO: 2655 - DNA, 20 bp, Artificial Sequence
  Description of Artificial Sequence: Synthetic oligonucleotide
tgtttggctttcagttatat

SEQ ID NO: 2656 - DNA, 21 bp, Artificial Sequence
  Description of Artificial Sequence: Synthetic oligonucleotide
tgtttggctttcagttatatg

SEQ ID NO: 2657 - DNA, 20 bp, Artificial Sequence
  Description of Artificial Sequence: Synthetic oligonucleotide
tgtttgtttaaagactggga

SEQ ID NO: 2658 - DNA, 20 bp, Artificial Sequence
  Description of Artificial Sequence: Synthetic oligonucleotide
tgttttagaaaacttcctat

SEQ ID NO: 2659 - DNA, 20 bp, Artificial Sequence
  Description of Artificial Sequence: Synthetic oligonucleotide
tgttttgctcgcagcaggtc

SEQ ID NO: 2660 - DNA, 20 bp, Artificial Sequence
  Description of Artificial Sequence: Synthetic oligonucleotide
ttaaagacaggtacagtaga

SEQ ID NO: 2661 - DNA, 20 bp, Artificial Sequence
  Description of Artificial Sequence: Synthetic oligonucleotide
ttaaagactgggaggagttg

SEQ ID NO: 2662 - DNA, 20 bp, Artificial Sequence
  Description of Artificial Sequence: Synthetic oligonucleotide
ttaaaggtctttgtactagg

SEQ ID NO: 2663 - DNA, 20 bp, Artificial Sequence
  Description of Artificial Sequence: Synthetic oligonucleotide
ttaaatgtatacccaaagac

SEQ ID NO: 2664 - DNA, 20 bp, Artificial Sequence
  Description of Artificial Sequence: Synthetic oligonucleotide
ttaacacccacccaggtagc

SEQ ID NO: 2665 - DNA, 20 bp, Artificial Sequence
  Description of Artificial Sequence: Synthetic oligonucleotide
ttaacaggcctattgattgg

SEQ ID NO: 2666 - DNA, 21 bp, Artificial Sequence
  Description of Artificial Sequence: Synthetic oligonucleotide
ttaactagatgttctggataa

SEQ ID NO: 2667 - DNA, 20 bp, Artificial Sequence
  Description of Artificial Sequence: Synthetic oligonucleotide
ttaactgtaagtgggcctac

SEQ ID NO: 2668 - DNA, 20 bp, Artificial Sequence
  Description of Artificial Sequence: Synthetic oligonucleotide
ttaatacccttatccaatgg

SEQ ID NO: 2669 - DNA, 20 bp, Artificial Sequence
  Description of Artificial Sequence: Synthetic oligonucleotide
ttaatcattacttccaaact

SEQ ID NO: 2670 - DNA, 20 bp, Artificial Sequence
  Description of Artificial Sequence: Synthetic oligonucleotide
ttaatgagaaaagaagattg

SEQ ID NO: 2671 - DNA, 20 bp, Artificial Sequence
  Description of Artificial Sequence: Synthetic oligonucleotide
ttacacactctatggaaggc

SEQ ID NO: 2672 - DNA, 20 bp, Artificial Sequence
  Description of Artificial Sequence: Synthetic oligonucleotide
ttacagttaatgagaaaaga

SEQ ID NO: 2673 - DNA, 20 bp, Artificial Sequence
  Description of Artificial Sequence: Synthetic oligonucleotide
ttaccattggataagggtat

SEQ ID NO: 2674 - DNA, 20 bp, Artificial Sequence
  Description of Artificial Sequence: Synthetic oligonucleotide
ttaccccgttgcccggcaac

SEQ ID NO: 2675 - DNA, 20 bp, Artificial Sequence
  Description of Artificial Sequence: Synthetic oligonucleotide
ttacgcggactccccgtctg

SEQ ID NO: 2676 - DNA, 20 bp, Artificial Sequence
  Description of Artificial Sequence: Synthetic oligonucleotide
ttactgctcctgaactggag

SEQ ID NO: 2677 - DNA, 20 bp, Artificial Sequence
  Description of Artificial Sequence: Synthetic oligonucleotide
ttagaaaacttcctattaac

SEQ ID NO: 2678 - DNA, 20 bp, Artificial Sequence
  Description of Artificial Sequence: Synthetic oligonucleotide
ttagattaaaggtctttgta

SEQ ID NO: 2679 - DNA, 20 bp, Artificial Sequence
  Description of Artificial Sequence: Synthetic oligonucleotide
ttagattgaatacatgcata

SEQ ID NO: 2680 - DNA, 20 bp, Artificial Sequence
  Description of Artificial Sequence: Synthetic oligonucleotide
ttagggtttaaatgtatacc

SEQ ID NO: 2681 - DNA, 20 bp, Artificial Sequence
  Description of Artificial Sequence: Synthetic oligonucleotide
ttagtattccttggactcat

SEQ ID NO: 2682 - DNA, 20 bp, Artificial Sequence
  Description of Artificial Sequence: Synthetic oligonucleotide
ttatatggatgatgtggtat

SEQ ID NO: 2683 - DNA, 20 bp, Artificial Sequence
  Description of Artificial Sequence: Synthetic oligonucleotide
ttatcagtcccgataatgtt

SEQ ID NO: 2684 - DNA, 20 bp, Artificial Sequence
  Description of Artificial Sequence: Synthetic oligonucleotide
ttcaaagactgtttgtttaa

SEQ ID NO: 2685 - DNA, 20 bp, Artificial Sequence
  Description of Artificial Sequence: Synthetic oligonucleotide
ttcacctctgcacgtcgcat

SEQ ID NO: 2686 - DNA, 20 bp, Artificial Sequence
  Description of Artificial Sequence: Synthetic oligonucleotide
ttcactttctcgccaactta

SEQ ID NO: 2687 - DNA, 20 bp, Artificial Sequence
  Description of Artificial Sequence: Synthetic oligonucleotide
ttcaggtattgtttacacag

SEQ ID NO: 2688 - DNA, 20 bp, Artificial Sequence
  Description of Artificial Sequence: Synthetic oligonucleotide
ttccaaattaacacccaccc

SEQ ID NO: 2689 - DNA, 20 bp, Artificial Sequence
  Description of Artificial Sequence: Synthetic oligonucleotide
ttccaatgacataacccata

SEQ ID NO: 2690 - DNA, 20 bp, Artificial Sequence
  Description of Artificial Sequence: Synthetic oligonucleotide
ttccaggatcctcaaccacc

SEQ ID NO: 2691 - DNA, 20 bp, Artificial Sequence
  Description of Artificial Sequence: Synthetic oligonucleotide
ttccccaccttatgagtcca

SEQ ID NO: 2692 - DNA, 20 bp, Artificial Sequence
  Description of Artificial Sequence: Synthetic oligonucleotide
ttccccctagaaaattgaga

SEQ ID NO: 2693 - DNA, 20 bp, Artificial Sequence
  Description of Artificial Sequence: Synthetic oligonucleotide
ttcccgatacagagctgagg

SEQ ID NO: 2694 - DNA, 20 bp, Artificial Sequence
  Description of Artificial Sequence: Synthetic oligonucleotide
ttccgaaagcccaggatgat

SEQ ID NO: 2695 - DNA, 20 bp, Artificial Sequence
  Description of Artificial Sequence: Synthetic oligonucleotide
ttccggaaactactgttgtt

SEQ ID NO: 2696 - DNA, 20 bp, Artificial Sequence
  Description of Artificial Sequence: Synthetic oligonucleotide
ttccggaagtgttgatagga

SEQ ID NO: 2697 - DNA, 20 bp, Artificial Sequence
  Description of Artificial Sequence: Synthetic oligonucleotide
ttccgtccgaaggtttggta

SEQ ID NO: 2698 - DNA, 20 bp, Artificial Sequence
  Description of Artificial Sequence: Synthetic oligonucleotide
ttcctaatatacatttacac

SEQ ID NO: 2699 - DNA, 20 bp, Artificial Sequence
  Description of Artificial Sequence: Synthetic oligonucleotide
ttcctatgggagtgggcctc

SEQ ID NO: 2700 - DNA, 20 bp, Artificial Sequence
  Description of Artificial Sequence: Synthetic oligonucleotide
ttcctgtctggcgattggtg

SEQ ID NO: 2701 - DNA, 20 bp, Artificial Sequence
  Description of Artificial Sequence: Synthetic oligonucleotide
ttccttgagcagtagtcatg

SEQ ID NO: 2702 - DNA, 20 bp, Artificial Sequence
  Description of Artificial Sequence: Synthetic oligonucleotide
ttccttggactcataaggtg

SEQ ID NO: 2703 - DNA, 20 bp, Artificial Sequence
  Description of Artificial Sequence: Synthetic oligonucleotide
ttcgcactcctccagcttat

SEQ ID NO: 2704 - DNA, 20 bp, Artificial Sequence
  Description of Artificial Sequence: Synthetic oligonucleotide
ttctcaaaggtggagacagc

SEQ ID NO: 2705 - DNA, 20 bp, Artificial Sequence
  Description of Artificial Sequence: Synthetic oligonucleotide
ttctcatctgccggaccgtg

SEQ ID NO: 2706 - DNA, 20 bp, Artificial Sequence
  Description of Artificial Sequence: Synthetic oligonucleotide
ttctcgaggattggggaccc

SEQ ID NO: 2707 - DNA, 20 bp, Artificial Sequence
  Description of Artificial Sequence: Synthetic oligonucleotide
ttctcttccaaaagtgagac

SEQ ID NO: 2708 - DNA, 21 bp, Artificial Sequence
  Description of Artificial Sequence: Synthetic oligonucleotide
ttctcttccaaaagtgagaca

SEQ ID NO: 2709 - DNA, 20 bp, Artificial Sequence
  Description of Artificial Sequence: Synthetic oligonucleotide
ttcttgggaacaagatctac

SEQ ID NO: 2710 - DNA, 20 bp, Artificial Sequence
  Description of Artificial Sequence: Synthetic oligonucleotide
ttcttgtctcacttttggaa

SEQ ID NO: 2711 - DNA, 20 bp, Artificial Sequence
  Description of Artificial Sequence: Synthetic oligonucleotide
ttctttcccgaccaccagtt

SEQ ID NO: 2712 - DNA, 20 bp, Artificial Sequence
  Description of Artificial Sequence: Synthetic oligonucleotide
ttgaacagtaggacatgaac

SEQ ID NO: 2713 - DNA, 21 bp, Artificial Sequence
  Description of Artificial Sequence: Synthetic oligonucleotide
ttgaacagtaggacatgaaca

SEQ ID NO: 2714 - DNA, 20 bp, Artificial Sequence
  Description of Artificial Sequence: Synthetic oligonucleotide
ttgaagtcccaatctggatt

SEQ ID NO: 2715 - DNA, 20 bp, Artificial Sequence
  Description of Artificial Sequence: Synthetic oligonucleotide
ttgacatactttccaatcaa

SEQ ID NO: 2716 - DNA, 20 bp, Artificial Sequence
  Description of Artificial Sequence: Synthetic oligonucleotide
ttgacattgcagagagtcca

SEQ ID NO: 2717 - DNA, 20 bp, Artificial Sequence
  Description of Artificial Sequence: Synthetic oligonucleotide
ttgagaaacactcatcctca

SEQ ID NO: 2718 - DNA, 20 bp, Artificial Sequence
  Description of Artificial Sequence: Synthetic oligonucleotide
ttgaggatcctggaattaga

SEQ ID NO: 2719 - DNA, 20 bp, Artificial Sequence
  Description of Artificial Sequence: Synthetic oligonucleotide
ttgattggaaagtatgtcaa

SEQ ID NO: 2720 - DNA, 20 bp, Artificial Sequence
  Description of Artificial Sequence: Synthetic oligonucleotide
ttgcaatcttcttttctcat

SEQ ID NO: 2721 - DNA, 21 bp, Artificial Sequence
  Description of Artificial Sequence: Synthetic oligonucleotide
ttgcatggtgctggtgcgcag

SEQ ID NO: 2722 - DNA, 20 bp, Artificial Sequence
  Description of Artificial Sequence: Synthetic oligonucleotide
ttgccagcaaatccgcctcc

SEQ ID NO: 2723 - DNA, 20 bp, Artificial Sequence
  Description of Artificial Sequence: Synthetic oligonucleotide
ttgcccaaggtcttacataa

SEQ ID NO: 2724 - DNA, 21 bp, Artificial Sequence
  Description of Artificial Sequence: Synthetic oligonucleotide
ttgcctgaactttaggcccat

SEQ ID NO: 2725 - DNA, 20 bp, Artificial Sequence
  Description of Artificial Sequence: Synthetic oligonucleotide
ttgcctgagtgcagtatggt

SEQ ID NO: 2726 - DNA, 21 bp, Artificial Sequence
  Description of Artificial Sequence: Synthetic oligonucleotide
ttgctctgaaggctggatcca

SEQ ID NO: 2727 - DNA, 21 bp, Artificial Sequence
  Description of Artificial Sequence: Synthetic oligonucleotide
ttgctgtgtttgctctgaagg

SEQ ID NO: 2728 - DNA, 20 bp, Artificial Sequence
  Description of Artificial Sequence: Synthetic oligonucleotide
ttgcttgcctgagtgcagta

SEQ ID NO: 2729 - DNA, 20 bp, Artificial Sequence
  Description of Artificial Sequence: Synthetic oligonucleotide
ttggaagagaaaccgttata

SEQ ID NO: 2730 - DNA, 20 bp, Artificial Sequence
  Description of Artificial Sequence: Synthetic oligonucleotide
ttggaagatccagcatctag

SEQ ID NO: 2731 - DNA, 20 bp, Artificial Sequence
  Description of Artificial Sequence: Synthetic oligonucleotide
ttggaggacaggaggttggt

SEQ ID NO: 2732 - DNA, 20 bp, Artificial Sequence
  Description of Artificial Sequence: Synthetic oligonucleotide
ttggatccagccttcagagc

SEQ ID NO: 2733 - DNA, 20 bp, Artificial Sequence
  Description of Artificial Sequence: Synthetic oligonucleotide
ttggcgagaaagtgaaagcc

SEQ ID NO: 2734 - DNA, 20 bp, Artificial Sequence
  Description of Artificial Sequence: Synthetic oligonucleotide
ttggctttcagttatatgga

SEQ ID NO: 2735 - DNA, 20 bp, Artificial Sequence
  Description of Artificial Sequence: Synthetic oligonucleotide
ttgggacttcaatcccaaca

SEQ ID NO: 2736 - DNA, 20 bp, Artificial Sequence
  Description of Artificial Sequence: Synthetic oligonucleotide
ttgggattgaagtcccaatc

SEQ ID NO: 2737 - DNA, 20 bp, Artificial Sequence
  Description of Artificial Sequence: Synthetic oligonucleotide
ttgggggaggagattagatt

SEQ ID NO: 2738 - DNA, 20 bp, Artificial Sequence
  Description of Artificial Sequence: Synthetic oligonucleotide
ttgggtatacatttaaaccc

SEQ ID NO: 2739 - DNA, 20 bp, Artificial Sequence
  Description of Artificial Sequence: Synthetic oligonucleotide
ttggtaacagcggtaaaaag

SEQ ID NO: 2740 - DNA, 20 bp, Artificial Sequence
  Description of Artificial Sequence: Synthetic oligonucleotide
ttggtggtctataagctgga

SEQ ID NO: 2741 - DNA, 20 bp, Artificial Sequence
  Description of Artificial Sequence: Synthetic oligonucleotide
ttggtgtaaatgtatattag

SEQ ID NO: 2742 - DNA, 20 bp, Artificial Sequence
  Description of Artificial Sequence: Synthetic oligonucleotide
ttggttcttctggactatca

SEQ ID NO: 2743 - DNA, 21 bp, Artificial Sequence
  Description of Artificial Sequence: Synthetic oligonucleotide
ttgtactaggaggctgtaggc

SEQ ID NO: 2744 - DNA, 20 bp, Artificial Sequence
  Description of Artificial Sequence: Synthetic oligonucleotide
ttgtagtatgccctgagcct

SEQ ID NO: 2745 - DNA, 20 bp, Artificial Sequence
  Description of Artificial Sequence: Synthetic oligonucleotide
ttgtatgcatgtattcaatc

SEQ ID NO: 2746 - DNA, 20 bp, Artificial Sequence
  Description of Artificial Sequence: Synthetic oligonucleotide
ttgtctcacttttggaagag

SEQ ID NO: 2747 - DNA, 20 bp, Artificial Sequence
  Description of Artificial Sequence: Synthetic oligonucleotide
ttgtctttgggtatacattt

SEQ ID NO: 2748 - DNA, 21 bp, Artificial Sequence
  Description of Artificial Sequence: Synthetic oligonucleotide
ttgtggcaaggacccataact

SEQ ID NO: 2749 - DNA, 20 bp, Artificial Sequence
  Description of Artificial Sequence: Synthetic oligonucleotide
ttgtgggtcaccatattctt

SEQ ID NO: 2750 - DNA, 20 bp, Artificial Sequence
  Description of Artificial Sequence: Synthetic oligonucleotide
ttgttcatgtcctactgttc

SEQ ID NO: 2751 - DNA, 21 bp, Artificial Sequence
  Description of Artificial Sequence: Synthetic oligonucleotide
ttgttggttcttctggactat

SEQ ID NO: 2752 - DNA, 21 bp, Artificial Sequence
  Description of Artificial Sequence: Synthetic oligonucleotide
ttgtttacacagaaaggcctt

SEQ ID NO: 2753 - DNA, 20 bp, Artificial Sequence
  Description of Artificial Sequence: Synthetic oligonucleotide
tttaaaccctaacaaaacaa

SEQ ID NO: 2754 - DNA, 20 bp, Artificial Sequence
  Description of Artificial Sequence: Synthetic oligonucleotide
tttaaagactgggaggagtt

SEQ ID NO: 2755 - DNA, 20 bp, Artificial Sequence
  Description of Artificial Sequence: Synthetic oligonucleotide
tttaaatgtatacccaaaga

SEQ ID NO: 2756 - DNA, 20 bp, Artificial Sequence
  Description of Artificial Sequence: Synthetic oligonucleotide
tttaatctaatctcctcccc

SEQ ID NO: 2757 - DNA, 20 bp, Artificial Sequence
  Description of Artificial Sequence: Synthetic oligonucleotide
tttacacactctatggaagg

SEQ ID NO: 2758 - DNA, 20 bp, Artificial Sequence
  Description of Artificial Sequence: Synthetic oligonucleotide
tttacacagaaaggccttgt

SEQ ID NO: 2759 - DNA, 20 bp, Artificial Sequence
  Description of Artificial Sequence: Synthetic oligonucleotide
tttaccccgttgcccggcaa

SEQ ID NO: 2760 - DNA, 20 bp, Artificial Sequence
  Description of Artificial Sequence: Synthetic oligonucleotide
tttagaaaacttcctattaa

SEQ ID NO: 2761 - DNA, 20 bp, Artificial Sequence
  Description of Artificial Sequence: Synthetic oligonucleotide
tttataagggtcgatgtcca

SEQ ID NO: 2762 - DNA, 20 bp, Artificial Sequence
  Description of Artificial Sequence: Synthetic oligonucleotide
tttatgggttatgtcattgg

SEQ ID NO: 2763 - DNA, 20 bp, Artificial Sequence
  Description of Artificial Sequence: Synthetic oligonucleotide
tttcagttatatggatgatg

SEQ ID NO: 2764 - DNA, 20 bp, Artificial Sequence
  Description of Artificial Sequence: Synthetic oligonucleotide
tttccgaaagcccaggatga

SEQ ID NO: 2765 - DNA, 21 bp, Artificial Sequence
  Description of Artificial Sequence: Synthetic oligonucleotide
tttccttcagtacgagatctt

SEQ ID NO: 2766 - DNA, 20 bp, Artificial Sequence
  Description of Artificial Sequence: Synthetic oligonucleotide
tttctcaaaggtggagacag

SEQ ID NO: 2767 - DNA, 20 bp, Artificial Sequence
  Description of Artificial Sequence: Synthetic oligonucleotide
tttctcattaactgtaagtg

SEQ ID NO: 2768 - DNA, 20 bp, Artificial Sequence
  Description of Artificial Sequence: Synthetic oligonucleotide
tttctcctggctcagtttac

SEQ ID NO: 2769 - DNA, 20 bp, Artificial Sequence
  Description of Artificial Sequence: Synthetic oligonucleotide
tttctcttccaaaagtgaga

SEQ ID NO: 2770 - DNA, 20 bp, Artificial Sequence
  Description of Artificial Sequence: Synthetic oligonucleotide
tttctgtgtaaacaatacct

SEQ ID NO: 2771 - DNA, 20 bp, Artificial Sequence
  Description of Artificial Sequence: Synthetic oligonucleotide
tttcttgtctcacttttgga

SEQ ID NO: 2772 - DNA, 21 bp, Artificial Sequence
  Description of Artificial Sequence: Synthetic oligonucleotide
tttcttgttgacaagaatcct

SEQ ID NO: 2773 - DNA, 20 bp, Artificial Sequence
  Description of Artificial Sequence: Synthetic oligonucleotide
tttgaagtatgcctcaaggt

SEQ ID NO: 2774 - DNA, 20 bp, Artificial Sequence
  Description of Artificial Sequence: Synthetic oligonucleotide
tttgagaaacactcatcctc

SEQ ID NO: 2775 - DNA, 21 bp, Artificial Sequence
  Description of Artificial Sequence: Synthetic oligonucleotide
tttgccttctgacttctttcc

SEQ ID NO: 2776 - DNA, 20 bp, Artificial Sequence
  Description of Artificial Sequence: Synthetic oligonucleotide
tttgctccagacctgctgcg

SEQ ID NO: 2777 - DNA, 20 bp, Artificial Sequence
  Description of Artificial Sequence: Synthetic oligonucleotide
tttgctcgcagcaggtctgg

SEQ ID NO: 2778 - DNA, 20 bp, Artificial Sequence
  Description of Artificial Sequence: Synthetic oligonucleotide
tttgctctgaaggctggatc

SEQ ID NO: 2779 - DNA, 21 bp, Artificial Sequence
  Description of Artificial Sequence: Synthetic oligonucleotide
tttgctgccccatttacacaa

SEQ ID NO: 2780 - DNA, 20 bp, Artificial Sequence
  Description of Artificial Sequence: Synthetic oligonucleotide
tttgctgtgtttgctctgaa

SEQ ID NO: 2781 - DNA, 20 bp, Artificial Sequence
  Description of Artificial Sequence: Synthetic oligonucleotide
tttggaagagaaaccgttat

SEQ ID NO: 2782 - DNA, 20 bp, Artificial Sequence
  Description of Artificial Sequence: Synthetic oligonucleotide
tttggaagatccagcatcta

SEQ ID NO: 2783 - DNA, 20 bp, Artificial Sequence
  Description of Artificial Sequence: Synthetic oligonucleotide
tttggaagtaatgattaact

SEQ ID NO: 2784 - DNA, 20 bp, Artificial Sequence
  Description of Artificial Sequence: Synthetic oligonucleotide
tttggtggtctataagctgg

SEQ ID NO: 2785 - DNA, 20 bp, Artificial Sequence
  Description of Artificial Sequence: Synthetic oligonucleotide
tttggtgtctttcggagtgt

SEQ ID NO: 2786 - DNA, 20 bp, Artificial Sequence
  Description of Artificial Sequence: Synthetic oligonucleotide
tttgtaggcccacttacagt

SEQ ID NO: 2787 - DNA, 20 bp, Artificial Sequence
  Description of Artificial Sequence: Synthetic oligonucleotide
tttgtagtatgccctgagcc

SEQ ID NO: 2788 - DNA, 20 bp, Artificial Sequence
  Description of Artificial Sequence: Synthetic oligonucleotide
tttgtatgatgtgttcttgt

SEQ ID NO: 2789 - DNA, 20 bp, Artificial Sequence
  Description of Artificial Sequence: Synthetic oligonucleotide
tttgtctttgggtatacatt

SEQ ID NO: 2790 - DNA, 20 bp, Artificial Sequence
  Description of Artificial Sequence: Synthetic oligonucleotide
tttgtgggtcaccatattct

SEQ ID NO: 2791 - DNA, 20 bp, Artificial Sequence
  Description of Artificial Sequence: Synthetic oligonucleotide
ttttatgggttatgtcattg

SEQ ID NO: 2792 - DNA, 21 bp, Artificial Sequence
  Description of Artificial Sequence: Synthetic oligonucleotide
ttttccgaaagcccaggatga

SEQ ID NO: 2793 - DNA, 20 bp, Artificial Sequence
  Description of Artificial Sequence: Synthetic oligonucleotide
ttttctcattaactgtaagt

SEQ ID NO: 2794 - DNA, 20 bp, Artificial Sequence
  Description of Artificial Sequence: Synthetic oligonucleotide
ttttgataatgtcttggtgt

SEQ ID NO: 2795 - DNA, 20 bp, Artificial Sequence
  Description of Artificial Sequence: Synthetic oligonucleotide
ttttgctcgcagcaggtctg

SEQ ID NO: 2796 - DNA, 20 bp, Artificial Sequence
  Description of Artificial Sequence: Synthetic oligonucleotide
ttttggaagagaaaccgtta

SEQ ID NO: 2797 - DNA, 20 bp, Artificial Sequence
  Description of Artificial Sequence: Synthetic oligonucleotide
ttttgtatgatgtgttcttg

SEQ ID NO: 2798 - DNA, 20 bp, Artificial Sequence
  Description of Artificial Sequence: Synthetic oligonucleotide
tttttgataatgtcttggtg

SEQ ID NO: 2799 - protein, 8 aa, Artificial Sequence
  Description of Artificial Sequence: Synthetic peptide
SGGSSGGS
